(19) United States
(12) Patent Application Publication
(10) Pub. No.: US 2004/0171823 A1
(43) Pub. Date: Sep. 2, 2004

(54) Polynucleotides and polypeptides associated with the NF-kappaB pathway

(76) Inventors: Steven G. Nadler, Princeton, NJ (US); Michael G. Neubauer, Skillman, NJ (US); John N. Feder, Belle Mead, NJ (US); Julie Carman, Lawrenceville, NJ (US)

Correspondence Address: STEPHEN B. DAVIS, BRISTOL-MYERS SQUIBB COMPANY, PATENT DEPARTMENT, P O BOX 4000, PRINCETON, NJ, 08543-4000, US

(21) Appl. No.: 10/755,889

(22) Filed: Jan. 13, 2004

Related U.S. Application Data
(60) Provisional application No. 60/440,068, filed on Jan. 14, 2003.
(60) Provisional application No. 60/469,757, filed on May 12, 2003.

(51) Int. Cl. C12Q 1/68; C07H 21/04

(52) U.S. Cl. 536/23.2; 435/6

(57) ABSTRACT

The present invention relates to polynucleotide and polypeptide sequences newly identified as associated with the NF-κB pathway. The identification of such polynucleotides and polypeptides is an important advancement toward discovering and identifying new drug targets for the treatment of NF-κB pathway-related diseases, disorders, and conditions. The invention further relates to compositions and methods for the treatment of diseases or disorders associated with the NF-κB signaling pathway using the sequences of the invention.

[0001] This application claims benefit to provisional application U.S. Ser. No. 60/440,068 filed Jan. 14, 2003; and to provisional application U.S. Serial No. 60/469,757, filed May 12, 2003; under 35 U.S.C. 119(e). The entire teachings of the referenced applications are incorporated herein by reference.

### FIELD OF THE INVENTION

[0002] The present invention relates to polynucleotide and polypeptide sequences newly identified as associated with the NF-κB pathway. In particular, this invention relates to the discovery of polynucleotides and polypeptides that are associated with regulating, i.e. decreasing or increasing, NF-κB pathway activity, either directly or indirectly. The polynucleotides and polypeptides of the invention serve as new targets for discovering and identifying protein modulators, e.g. drugs, compounds or biological agents for the treatment of NF-κB pathway-related diseases, disorders, and/or conditions. The invention further relates to compositions and methods for the treatment and prevention of diseases or disorders associated with the NF-κB pathway.

### BACKGROUND OF THE INVENTION

[0003] The Nuclear Factor-κB signaling pathway (NF-κB pathway) is a critical mediator of intracellular signaling and gene expression in virtually all cell types. NF-κB is composed of dimeric complexes of p50 (NF-κB1) or p52 (NF-κB2) that are usually associated with members of the Rel family (p65, c-Rel, Rel B) which have potent transactivation domains. Different combinations of NF-κB/Rel proteins bind to distinct κB sites to regulate the transcription of different genes. Early work involving NF-κB suggested that its expression was limited to specific cell types, particularly in stimulating the transcription of genes encoding kappa immunoglobulins in B lymphocytes. However, it has been discovered that NF-κB is, in fact, present and inducible in many, if not all, cell types and that it acts as an intracellular messenger capable of playing a broad role in gene regulation as a mediator of inducible signal transduction. Specifically, it has been demonstrated that NF-κB plays a central role in the regulation of intercellular signals in many cell types. For example, NF-κB has been shown to positively regulate the human beta-interferon (beta-IFN) gene in many, if not all, cell types. Moreover, NF-κB has also been shown to serve the important function of acting as an intracellular transducer of external influences.

[0004] As a transcriptional activator, NF-κB plays a central role in regulating the transcription of a number of genes, including those which encode proteins involved in inflammatory and immune responses. Representative examples of genes controlled by NF-κB include the cytokines tumor necrosis factor (TNF-α), IL-1β, IL-6, and IL-8; the adhesion molecules E-selecting and vascular cell adhesion molecule (VCAM)-1; and the enzyme nitric oxide (NO)-synthase (for reviews, see Siebenlist et al. Annu. Rev. Cell Biol. 10: 405-455, 1994; Bauerle and Baltimore, Cell, 87:13-20, 1997). Also, NF-κB has been shown to be induced by several stimuli, in addition to mediators of immune function, such as UV irradiation, growth factors, and viral infection.

[0005] The NF-κB transcription factor normally resides in the cytoplasm in unstimulated cells as an inactive complex with a member of the inhibitor κB (IκB) inhibitory protein family. The IκB class of proteins includes IκB-α, IκB-β, and IκB-ε—all of which contain ankyrin repeats for complexing with NF-κB (for review, see Whiteside et al., EMBO J. 16:1413-1426,1997). In the case of IκB-α, the most carefully studied member of this class, stimulation of cells with agents which activate NF-κB-dependent gene transcription results in the phosphorylation of IκB-α at serine-32 and serine-36 (Brown et al. Science, 267:1485-1488, 1995).

[0006] IκB is a cytoplasmic protein that controls NF-κB activity by retaining NF-κB in the cytoplasm. IκB is phosphorylated by the IκB kinase (IKK), which has two isoforms, IKK-1 (or IκB kinase α, IKKα) and IKK-2 (or IκB kinase β, IKKβ.). Upon phosphorylation of IκB by IKK, NF-κB is rapidly released into the cell and translocates to the nucleus where it binds to the promoters of many genes and up-regulates the transcription of pro-inflammatory genes. Inhibitors of IKK can block the phosphorylation of IκB and further downstream effects, specifically those associated with NF-κB transcription factors.

[0007] Aberrant NF-κB activity is associated with a number of human diseases. Mutations or truncations of IκB have been observed in some Hodgkins lymphomas (Cabannes et al. (1999) Oncogene 18:3063-3070). Genes encoding p65, p105, and p100 have been reported to be overexpressed or rearranged in some solid and hematopoietic tumors (Rayet et al. (1999) Oncogene 18:6938-6947). Missense mutations in IKKγ have been seen in some hyper-IgM syndromes characterized by hypohydrotic ectodermal dysplasia (Jain et al. (2001) Nature Immunol. 2:223-228), and in cases of X-linked anhidrotic ectodermal dysplasia with immunodeficiency (Doffinger et al. (2001) Nature Genet. 27:277-285). Genome rearrangements in IKKγ have also been observed in cases of familial incontinentia pigmenti (The International Incontinentia Pigmenti Consortium (2000) Nature 405:466-472).

[0008] In addition to the above genetic diseases, NF-κB is involved in many viral infections (Hiscott et al. (2001) J. Clin. Invest. 107:143-151). Several families of viruses including HIV-1, HTLV-1, hepatitis B, hepatitis C, EBV, and influenza activate NF-κB. The mechanisms of activation are distinct, and in some cases have not been well characterized. Some viral proteins have been identified that activate NF-κB including influenza virus hemagglutinin, matrix protein, and nucleoprotein; hepatitis B nucleoprotein and HBx protein; hepatitis C core protein; HTLV-1 Tax protein; HIV-1 Tat protein; and EBV LMP1 protein. The activation of NF-κB in target cells facilitates viral replication, host cell survival, and evasion of immune responses.

[0009] Many inflammatory diseases are associated with constitutive nuclear NF-κB localization and transcriptional activity. NF-κB is activated in the inflamed synovium of rheumatoid arthritis patients (Marok et al. (1996) Arthritis Rheum. 39:583-591) and in animal models of arthritis (Miagkov et al. (1998) Proc. Natl. Acad. Sci. USA 95:13859-13864). Gene transfer of a dominant negative IkBα significantly inhibited TNFα secretion by human synoviocytes (Bondeson et al. (1999) Proc. Natl. Acad. Sci. USA 96:5668-5673). In animal models of inflammatory bowel disease, treatment with antisense p65 oligonucleotides significantly inhibited clinical and histological signs of colitis (Neurath et al. Nature Med. 2:998-1004). NF-κB has also been associated with other inflammatory diseases including asthma, atherosclerosis, cachexia, euthyroid sick syndrome, and stroke (Yamamoto et al. (2001) J. Clin. Invest. 107:135-142). Therefore, regulation of NF-κB and/or its activation pathway provides a means for treating a wide range of diseases. See also, e.g., Baldwin, 1996, “The NF-κB and IκB Proteins: New Discoveries and Insights,” Annual Rev. Immunol., Vol. 14:649-81; and Christman et al., 2000, “Impact of Basic Research on Tomorrow's Medicine, The Role of Nuclear Factor-κB in Pulmonary Diseases,” Chest, Vol. 117:1482-87.

### SUMMARY OF THE INVENTION

[0010] This invention relates to polynucleotide and polypeptide sequences that are newly identified as associated with the NF-κB pathway. In particular, this invention relates to the discovery of polynucleotides and polypeptides that are associated with, regulated in, or regulate, i.e. decrease or increase, NF-κB pathway activity. According to the present invention, the identification of such polynucleotides and polypeptides, signaling pathways and pathway components is an important step toward discovering and identifying new drug targets for the treatment and prevention of NF-κB pathway-related diseases, disorders, and conditions, as described herein.

[0011] In accordance with this invention, subtraction library and microarray methods were utilized to isolate and identify new proteins associated with the NF-κB pathway. According to this invention and the findings related thereto, the NF-κB pathway-associated polypeptides can serve as drug targets for NF-κB pathway-related diseases and conditions. In addition, the proteins can be utilized as described herein to identify and/or screen for modulators, e.g., agonists or antagonists, for use in methods and compositions for the prevention and treatment of NF-κB-related disorders. It is to be understood that throughout this disclosure, the present invention relates to methods and compositions suitable for the prevention, treatment and therapeutic intervention of the NF-κB pathway and related diseases, disorders and conditions.

[0012] In specific embodiments, the invention relates to the polynucleotide sequences set forth in Tables 1-6, as well as complementary sequences, sequence variants, mutants, fragments or portions thereof, as described herein. The present invention also encompasses nucleic acid probes and primers that are useful for assaying biological samples for the presence or expression of the proteins of the invention. In particular, this invention relates to methods of regulating activation of the NF-κB pathway in order to control expression of genes whose expression is regulated by NF-κB.

[0013] The invention further encompasses novel nucleic acid variants or mutations of the polynucleotides and polypeptides associated with the NF-κB pathway.

[0014] The present invention further relates to isolated proteins, polypeptides, peptides and antigenic epitopes thereof unique to, associated with, regulated in and/or which regulate the NF-κB pathway. In specific embodiments, the polypeptides or peptides comprise the amino acid sequences encoded by the polynucleotide sequences set forth in Tables 1-6, or portions thereof, as described herein. In addition, this invention encompasses isolated fusion proteins comprising the polypeptides or peptides encoded by the sequences set forth in Tables 1-6.

[0015] In another aspect, the present invention encompasses vectors or vector constructs, including expression vectors and cloning vectors, which contain the NF-κB pathway-associated nucleic acid sequences, or peptides encoding portions of the NF-κB pathway-associated nucleic acid sequences, or variants thereof, for the expression of the NF-κB pathway-associated nucleic acid molecule(s) in host organisms. The present invention also relates to host cells molecularly/genetically engineered to contain and/or express NF-κB pathway-associated nucleic acid molecules. Such host cells which express NF-κB pathway-associated polypeptides or peptides can be employed in screening assays as described herein, for example, to identify NF-κB pathway-associated polypeptide modulating compounds, and/or to assess the effect(s) of a variety of cell treatments and compounds on NF-κB pathway-associated polypeptide function or biological activity, which can include structural, biochemical, physiological, or biochemical functions in a cell. Further, host organisms that have been transformed with these nucleic acid molecules are also encompassed in the present invention, e.g., transgenic animals, particularly transgenic non-human animals, and particularly transgenic non-human mammals.

[0016] The present invention also relates isolated antibodies, including monoclonal and polyclonal antibodies, and antibody fragments, that are specifically reactive with the NF-κB-associated polypeptides, fusion proteins, variants, or portions thereof, as disclosed herein. In specific embodiments, monoclonal antibodies are prepared to be specifically reactive with the NF-κB-associated polypeptides, fusion proteins, variants, or portions thereof.

[0017] It is another aspect of the present invention to provide modulators of the NF-κKB-associated polypeptides and peptide targets that can affect the function or activity of the NF-κB associated polypeptides in a cell and modulate or affect NF-κB-mediated transcription and signal transduction. In addition, modulators of the NF-κB-associated polypeptides can affect downstream systems and molecules that are regulated by, or that interact with, the NF-κB-associated polypeptides in the cell. Such modulators can be used as therapeutics for the treatment of NF-κB pathway-related disorders. Modulators of the NF-κB-associated polypeptides include antagonists, agonists, inhibitors, ligands, and binding factors. Antagonists include compounds, materials, agents, drugs, and the like, that antagonize, inhibit, reduce, block, suppress, diminish, decrease, or eliminate NF-κB pathway-associated protein function and/or activity. Alternatively, agonist modulators of NF-κB pathway-associated polypeptides include compounds, materials, agents, drugs, and the like, that agonize, enhance, increase, augment, or amplify NF-κB pathway-associated protein function in a cell.

[0018] Antagonists and agonists of the present invention also include, for example, small molecules, large molecules and antibodies directed against the NF-κB pathway-associated polypeptides or peptides thereof. Antagonists and agonists of the invention also include nucleotide sequences, such as antisense, small interfering RNAs, and ribozyme molecules, and gene or regulatory sequence replacement constructs, that can be used to inhibit or enhance expression of the NF-κB pathway-associated polypeptide encoding nucleic acid molecules, or oligomeric portions thereof, such as peptide encoding nucleic acid fragments.

[0019] Yet another aspect of this invention provides methods and compositions, including pharmaceutical compositions, for the treatment and/or prevention of NF-κB pathway-related disorders and conditions. The compositions can comprise the modulators of the NF-κB pathway-associated polypeptides, or peptides thereof. Pharmaceutical compositions preferably comprising a pharmaceutically and/or physiologically acceptable diluent, excipient, or carrier (vehicle) are provided. The modulators can be employed alone, or in combination with other standard treatment regimens for NF-κB pathway-related diseases and/or conditions. Such methods and compositions are capable of modulating the level of NF-κB pathway-associated polypeptide gene expression and/or the level of activity of the NF-κB-associated polypeptide. The methods include, for example, modulating the expression of the NF-κB pathway-associated polypeptide, or modulating the expression of a gene or gene product that is regulated or controlled by the NF-κB-associated polypeptide, including NF-κB, effective for the treatment of NF-κB-related disorders.

[0020] It is another aspect of the invention to provide screening methods for the identification of compounds, materials, substances, drugs, and agents that modulate the expression of the NF-κB pathway-associated polypeptides and/or the activity of the NF-κB pathway-associated polypeptides. Such methods include, without limitation, assays that measure the effects of a test compound or agent on NF-κB pathway-associated polypeptide mRNA and/or gene product levels; assays that measure levels of NF-κB pathway-associated polypeptide activity or function; and assays that measure the levels or activities of molecules and/or systems that are regulated or mediated by NF-κB pathway-associated polypeptides, or modulators of such polypeptides, including, but not limited to, NF-κB.

[0021] It is another aspect of the present invention to provide the NF-κB pathway-associated polypeptides as components of the NF-κB signaling pathway and as affecting downstream cellular events, including NF-κB-mediated transcription and gene expression. Accordingly, downstream cellular events can be regulated via the activity of the NF-κB pathway-associated polypeptides using NF-κB pathway-associated polypeptide modulators, e.g., antagonists or agonists, such as antisense polynucleotides, polypeptides or low molecular weight chemicals to achieve a therapeutic effect in a broad variety of NF-κB pathway-related diseases including, but not limited to, proliferative disorders, cancers, ischemia-reperfusion injury, heart failure, immunocompromised conditions, HIV infection, hyper-IgM syndromes characterized by hypohydrotic ectodermal dysplasia, incontinentia pigmenti, inflammatory diseases including rheumatoid arthritis, osteoarthritis, inflammatory bowel disease, asthma, and chronic obstructive pulmonary disease, viral infections including HIV, HTLV-1, hepatitis B, hepatitis C, influenza, and EBV, atherosclerosis, cachexia, euthyroid sick syndrome, stroke, and renal diseases.

[0022] It is another aspect of this invention to provide NF-κB pathway-associated polynucleotides and polypeptides, and portions thereof, for treating, diagnosing, and/or ameliorating a broad variety of NF-κB pathway-related diseases including, but not limited to, proliferative disorders, cancers, ischemia-reperfusion injury, heart failure, immunocompromised conditions, HIV infection, and renal diseases. According to the invention, the NF-κB pathway-associated polynucleotides and polypeptides, and portions thereof, are useful for regulating NF-κB pathway activity.

[0023] It is another aspect of the present invention to provide antagonists or agonists directed against NF-κB pathway-associated polypeptides for treating, diagnosing, and/or ameliorating NF-κB pathway-related disorders including, but not limited to, proliferative disorders, cancers, ischemia-reperfusion injury, heart failure, immunocompromised conditions, HIV infection, and renal diseases. According to the present invention, antagonists or agonists directed against NF-κB-associated polypeptides are useful for regulating NF-κB pathway activity for diagnostic and therapeutic purposes.

[0024] In another aspect of the present invention, methods are provided for regulating second messenger pathways and molecules therein by modulating NF-κB pathway-associated polypeptide function and/or activity. More particularly, the present invention affords the ability to regulate, modulate, or affect the activity of the NF-κB pathway and components thereof by modulating, i.e. antagonizing or agonizing, the function and/or activity of the NF-κB pathway-associated polypeptides of the invention. NF-κB-associated polypeptide modulation can result in treatments for diseases and disorders that are mediated by NF-κB and/or other molecules related thereto. Accordingly, the present invention further provides methods of treating diseases that are caused by, or are associated with, the NF-κB pathway and/or its components, preferably in which antagonist or agonist modulators of NF-κB pathway-associated polypeptides are employed to decrease or increase the activity of the NF-κB pathway and/or its component molecules.

[0025] It is yet another aspect of the present invention to provide antisense nucleic acid molecules that specifically antagonize NF-κB pathway-associated nucleic acids, e.g., by binding to mRNA of NF-κB pathway-associated polypeptides or peptides. Antisense molecules refer to nucleotide sequences, e.g., oligomers, and compositions containing nucleic acid sequences that are complementary to a specific DNA or RNA sequence, such as NF-κB-associated polypeptide DNA or RNA sequences. Antisense moelcules may be single or double stranded.

[0026] An additional aspect of this invention pertains to the use of NF-κB pathway-associated polynucleotide sequences and antibodies including, monoclonal, polyclonal, and antibody fragments, directed against the produced polypeptides and peptides for diagnostic assessment of NF-κB pathway-related diseases or disorders.

[0027] Another aspect of the present invention relates to a method of diagnosing, ameliorating, treating, reducing, eliminating, or preventing a disease, disorder, and/or condition affected by modulation of the NF-κB pathway-associated-polypeptides in cells that express them, which involves providing a modulator, e.g., an agonist or antagonist, of the NF-κB-associated polypeptide in an amount effective to affect the function or activity of the polypeptide, and/or to effect the function or activity of cellular molecules that are associated or correlated with modulated polypeptide activity or function. Examples of diseases, disorders, and/or conditions that can be diagnosed, ameliorated, treated, reduced, eliminated, or prevented by the methods of this invention, in which NF-κB-associated polypeptides are modulated, include without limitation, proliferative disorders, cancers, ischemia-reperfusion injury, heart failure, immunocompromised conditions, HIV infection, hyper-IgM syndromes characterized by hypohydrotic ectodermal dysplasia, incontinentia pigmenti, inflammatory diseases including rheumatoid arthritis, osteoarthritis, inflammatory bowel disease, asthma, and chronic obstructive pulmonary disease, viral infections including HIV, HTLV-1, hepatitis B, hepatitis C, influenza, and EBV, atherosclerosis, cachexia, euthyroid sick syndrome, stroke, and renal diseases.

[0028] Further aspects, features, and advantages of the present invention will be better appreciated upon a reading of the detailed description of the invention when considered in connection with the accompanying figures or drawings.

### DESCRIPTION OF THE FIGURES

[0029] FIGS. 1A through 1DD show the real-time PCR results of newly identified sequences of the present invention that are inhibited by either NF-κB or the NF-κB pathway. RNA quantification was performed using the Taqman® real-time-PCR fluorogenic assay. FIG. 1A shows the results of CLK1 (Accession #L29219) (SEQ ID NOS: 1 & 2). FIG. 1B shows the results of Cytokine-Inducible Kinase (Accession #BC013899) (SEQ ID NOS: 3 & 4). FIG. 1C shows the results of GPR85 (Accession #AF250237) (SEQ ID NOS: 5 & 6). FIG. 1D shows the results of RGS16 (Accession #BC006243) (SEQ ID NOS: 7 & 8). FIG. 1E shows the results of SDCBP (Accession #BC013254) (SEQ ID NOS: 9 & 10). FIG. 1F shows the results of BTG1 (Accession #NM_{—}001731) (SEQ ID NOS: 11 & 12). FIG. 1G shows the results of JTB (Accession #NM_{—}006694) (SEQ ID NOS: 13 & 14). FIG. 1H shows the results of BCL2L11 (Accession #NM_{—}006538) (SEQ ID NOS: 15 & 16). FIG. 1I shows the results of BCL-6 (Accession #NM_{—}001706) (SEQ ID NOS: 17 & 18). FIG. 1J shows the results of EED (Accession #U90651) (SEQ ID NOS: 19 & 20). FIG. 1K shows the results of Similar to lysosomal amino acid transporter 1 (Accession #XM_{—}058449) (SEQ ID NOS: 21 & 22). FIG. 1L shows the results of Truncated Calcium Binding Protein (Accession #NM_{—}016175) (SEQ ID NOS: 23 & 24). FIG. 1M shows the results of WDR4 (Accession #AJ243913) (SEQ ID NOS: 25 & 26). FIG. 1N shows the results of FLJ22649 (Accession #NM_{—}021928) (SEQ ID NOS: 27 & 28). FIG. 10 shows the results of FLJ21313 (Accession #NM_{—}023927) (SEQ ID NOS: 29 & 30). FIG. 1P shows the results of MGC20791 (Accession #XM_{—}046111) (SEQ ID NOS: 31 & 32). FIG. 1Q shows the results of LOC113402 (Accession NM_{—}145169) (SEQ ID NOS: 33 & 34). FIG. 1R shows the results of DKFZp761I241 (Accession AL136565) (SEQ ID NOS: 35 & 36). FIG. 1S shows the results of DGCRK6 (Accession #AB050770) (SEQ ID NOS: 37 & 38). FIG. 1T shows the results of TNF-Induced Protein (Accession #BC007014) (SEQ ID NOS: 39 & 40). FIG. 1U shows the results of FLJ12120 (Accession #AK022182) (SEQ ID NOS: 747). FIG. 1V shows the results of GSA7 (Accession #NM_{—}006395) (SEQ ID NOS: 749 & 750). FIG. 1W shows the results of HSPC128 (Accession #NM_{—}014167) (SEQ ID NOS: 751 & 752). FIG. 1X shows the results of C2GNT3 (Accession #NM_{—}016591) (SEQ ID NOS: 753 & 754). FIG. 1Y shows the results of FLJ20512 (Accession #NM_{—}017854) (SEQ ID NOS: 755 & 756). FIG. 1Z shows the results of FLJ11715 (Accession #NM_{—}024564) (SEQ ID NOS: 757 & 758). FIG. 1AA shows the results of LNX (Accession #NM_{—}032622) (SEQ ID NOS: 759 & 760). FIG. 1BB shows the results of FLJ14547 (Accession #NM_{—}032804) (SEQ ID NOS: 761 & 762). FIG. 1CC shows the results of XBP1 (Accession #NM_{—}005080) (SEQ ID NOS: 763 & 764). FIG. 1DD shows the results of IL-23 alpha (IL23A)(Accession #NM_{—}016584) (SEQ ID NOS: 765 & 766).

[0030] FIGS. 2A through 2P show the real-time PCR results of newly identified sequences of the present invention that are induced by either NF-κB or the NF-κB pathway. RNA quantification was performed using the Taqmano real-time-PCR fluorogenic assay. FIG. 2A shows the results of SGKL (Accession #AF085233) (SEQ ID NOS: 41 & 42). FIG. 2B shows the results of KIAA0794 (Accession#AB018337) (SEQ ID NOS: 43 & 44). FIG. 2C shows the results of KIAA0456 (Accession #AB007925) (SEQ ID NOS: 45 & 46). FIG. 2D shows the results of ORPHAN NUCLEAR RECEPTOR TR4 (Accession #U10990) (SEQ ID NOS: 47 & 48). FIG. 2E shows the results of SUMO-1-specific protease (SUSP1, Accession #NM_{—}015571) (SEQ ID NOS: 49 & 50). FIG. 2F shows the results of SUMO-1 activating enzyme subunit 1 (Accession # NM_{—}005500) (SEQ ID NOS: 51 & 52). FIG. 2G shows the results of BRCA1-associated RING domain protein (BARD1, Accession #U76638) (SEQ. ID. NOS.: 53 & 54). FIG. 2H shows the results of MGC:4079 (Accession #BC005868) (SEQ ID NOS: 55 & 56). FIG. 2I shows the results FLJ23390 (Accession #AK027043) (SEQ ID NOS: 57 & 58). FIG. 2J shows the results of MGC19595 (Accession #NM_{—}033415) (SEQ ID NOS: 767 & 768). FIG. 2K shows the results of Gle1 (Accession #NM_{—}001499) (SEQ ID NOS: 769 & 770). FIG. 2L shows the results of BLVRA (Accession #NM_{—}000712) (SEQ ID NOS: 771 & 772). FIG. 2M shows the results of PPP1R7 (Accession #NM_{—}002712) (SEQ ID NOS: 773 & 774). FIG. 2N shows the results of MADH5 (Accession #NM_{—}005903) (SEQ ID NOS: 775 & 776). FIG. 2O shows the results of CHS1 (Accession #NM_{—}000081) (SEQ ID NOS: 777 & 778). FIG. 2P shows the results of ZNF304 (Accession #NM_{—}020657) (SEQ ID NOS: 779 & 780).

[0031] FIG. 3 shows the relationship of the Drosophila melanogaster Darkener of Apricot (DOA) gene to Human CDC-Like Kinase (CLK) genes.

[0032] FIG. 4 shows the effects of RNAi on NF-κB-dependent transcription.

[0033] FIGS. 5A through 5E show the effects of inhibitors of the NF-κB activation pathway on selected target genes. FIG. 5A shows inhibition or induction of Cytokine-Inducible Kinase (CNK) (Accession #BC013899) (SEQ ID NOS: 3 & 4) expression in the presence of the IKK-2 inhibitor, BMS-345541, or dexamethasone. FIG. 5B shows inhibition or induction of BCL-2 Like 11 (Accession #NM_{—}006538) (SEQ ID NOS: 15 & 16) expression in the presence of BMS-345541 or dexamethasone. FIG. 5C shows inhibition or induction of BCL-6 (Accession #NM_{—}001706) (SEQ ID NOS: 17 & 18) expression in the presence of BMS-345541 or dexamethasone. FIG. 5D shows inhibition or induction of MGC20791 (Accession #XM_{—}046111) (SEQ ID NOS: 31 & 32) expression in the presence of BMS-345541 or dexamethasone. FIG. 5E shows inhibition of Stat1 (Accession #NM_{—}007315) (SEQ ID NOS: 823 & 748) in the presence of BMS-345541 or dexamethasone.

[0034] FIGS. 6A through 6C show the NF-κB-dependent expression of selected target genes in mouse embryonic fibroblasts derived from germline knockouts of different NF-κB family members. FIG. 6A shows results of knockout experiments for Stat1 (Accession #NM_{—}007315) (SEQ ID NOS: 823 & 748). FIG. 6B shows results of knockout experiments for MGC20791 (Accession #XM_{—}046111) (SEQ ID NOS: 31 & 32). FIG. 6C shows results of knockout experiments for BCL-6 (Accession #NM_{—}001706) (SEQ ID NOS: 17 & 18).

[0035] FIG. 7A shows the level of transcriptional activity of NF-κB, TNFα, and IL-1β in an A549 cell line overexpressing the MGC20791 transcript, in addition to containing a stably integrated NF-κB reporter construct. As shown, overexpression of MGC20791 resulted in an increase in NF-κB-dependent transcriptional activity, but did not result in transcriptional increased activity in either TNFα or IL-1β. Experiments were performed as described in Example 12 herein.

[0036] FIG. 7B shows the protein level of MGC20791 expressed in A549 cells either in the presence (“MGC20791”) or absence (“CT”) of siRNA directed against MGC20791. Actin protein levels were used as a control. Protein levels were quantitated using anti-FLAG antibody to detect MGC20791 expression levels, and anti-actin antibody to normalize MGC20791 expression levels. As shown, MGC20791 expression levels were decreased in the presence of the MGC20791-directed siRNA reagents. Experiments were performed as described in Example 12 herein.

[0037] FIG. 8A shows the results of siRNA directed against MGC20791 on the levels in TNFα-induced and PMA/Ionomycin-induced NF-κB activation in A549 stable reporter cell lines. As shown, partial knockdown of the MGC20791 protein by siRNA resulted in decreased TNFα-induced and PMA/Ionomycin-induced NF-κB activation. Experiments were performed as described in Example 12 herein.

[0038] FIG. 8B shows the effect of siRNA directed against MGC20791 on TNFα-induced MCP-1 production by human umbilical vein endothelial cells (HUVEC). As shown, transfection of HUVECs with siRNA specific for MGC20791 significantly inhibited TNFα-dependent MCP-1 secretion at levels similar to the p65 subunit of NF-κB and the transcription factor Stat1. Experiments were performed as described in Example 12 herein.

### DETAILED DESCRIPTION OF THE INVENTION

[0039] The present invention identifies polynucleotide and polypeptide sequences that are associated with, regulated in, and/or regulate the NF-κB pathway. In particular, the present invention identifies new sequences that are regulated in or regulate, i.e. increase or decrease, NF-κB-dependent signal transduction and transcriptional activity. As stated above, the NF-κB pathway is now known to be a critical mediator of gene expression in a variety of cell types. For this reason, regulating or influencing transduction by NF-κB of extracellular signals, will enable one to selectively regulate the expression of proteins whose expression is mediated by NF-κB for the treatment of a broad variety of NF-κB-related diseases.

[0040] In accordance with the present invention, the proteins have been newly identified to be associated with the NF-κB pathway. Because of their first identification as proteins that regulate or influence NF-κB-dependent signaling and gene expression as described herein, the proteins emerge by virtue of the present invention as new targets for use in identifying protein modulators, e.g., drugs, compounds, or biological agents, and the like, of NF-κB-related cellular responses and for the treatment and prevention, of NF-κB-related diseases, disorders and conditions.

[0041] Briefly, to achieve the identification of polynucleotide and polypeptides associated with the NF-κB pathway, subtraction library and microarray assays were developed (Examples 1 and 4). Although the methods described above and in the Examples are the preferred methods for identifying protein targets that interact with NF-κB, such proteins may also be identified using alternative techniques well known in the art.

### Nucleic Acids and Variants

[0042] The present invention relates to the polynucleotide sequences shown in Tables 1-6 that are newly described by this invention as being involved in the NF-κB pathway, and in NF-κB-related diseases, disorders and conditions. Although the sequences are known in the art, they have not been previously shown to be associated with, or linked to, cellular responses associated with the NF-κB pathway, or NF-κB-related diseases, disorders and conditions.

[0043] As used herein, a polynucleotide or nucleic acid molecule or a nucleic acid can also refer to portions, fragments and/or degenerate variants of nucleic acid sequences, including naturally ocurring variants or mutant alleles thereof. Such portions or fragments include, for example, nucleic acid sequences that encode portions of the proteins identified in Tables 1-6 that correspond to functional domains of the proteins. In particular, a protein fragment, or peptide, as determined by the methods of the present invention is further embraced by the present invention.

[0044] The nucleic acid molecules as described herein can comprise the following sequences: (a) the DNA sequences shown in Tables 1-6 (SEQ ID NOS: 1, 3, 5, 7, 9, 11, 13, 15, 17, 19, 21, 23, 25, 27, 29, 31, 33, 35, 37, 39, 41, 43, 45, 47, 49, 51, 53, 55, 57, 59, 61, 63, 65, 67, 69, 71, 73, 75, 77, 79, 81, 83, 85, 87, 89, 91, 93, 95, 97, 99, 101, 103, 105, 107, 109, 111, 113, 115, 117, 119, 121, 123, 125, 127, 129, 131, 133, 135, 137, 139, 141, 143, 145, 147, 149, 151, 153, 155, 157, 159, 161, 163, 165, 167, 169, 171, 173, 175, 177, 179, 181, 183, 185, 187, 189, 191, 193, 195, 197, 199, 201, 203, 205, 207, 209, 211, 213, 215, 217, 219, 221, 223, 225, 227, 229, 231, 233, 235, 237, 239, 241, 243, 245, 247, 249, 251, 253, 255, 257, 259, 261, 263, 265, 267, 269, 271, 273, 275, 277, 279, 281, 283, 285, 287, 289, 291, 293, 295, 297, 299, 301, 303, 305, 307, 309, 311, 313, 315, 317, 319, 321, 323, 325, 327, 329, 331, 333, 335, 337, 339, 341, 343, 345, 347, 349, 351, 353, 355, 357, 359, 361, 363, 365, 367, 369, 371, 373, 375, 377, 379, 381, 383, 385, 387, 389, 391, 393, 395, 397, 399, 401, 403, 405, 407, 409, 411, 413, 415, 417, 419, 421, 423, 425, 427, 429, 431, 433, 435, 437, 439, 441, 443, 444, 446, 448, 450, 452, 454, 456, 458, 459, 461, 463, 465, 467, 469, 471, 473, 475, 477, 479, 481, 483, 485, 487, 489, 491, 493, 495, 497, 499, 501, 503, 505, 507, 509, 511, 513, 515, 517, 519, 521, 523, 525, 527, 529, 530, 532, 533, 535, 537, 539, 541, 543, 545, 547, 549, 551, 553, 555, 557, 559, 561, 563, 565, 567, 569, 571, 573, 575, 577, 579, 581, 583, 585, 587, 589, 591, 593, 595, 597, 599, 601, 603, 605, 607, 609, 611, 612, 614, 616, 618, 620, 622, 624, 626, 628, 630, 632, 634, 636, 638, 639, 641, 643, 645, 647, 649, 651, 653, 655, 657, 659, 661, 663, 665, 667, 669, 671, 673, 675, 747, 749, 751, 753, 755, 757, 759, 761, 763, 765, 767, 769, 771, 773, 775, 777, 779 & 823); (b) any nucleic acid sequences that encode the amino acid sequences shown in Tables 1-6 (SEQ ID NOS: 2, 4, 6, 8, 10, 12, 14, 16, 18, 20, 22, 24, 26, 28, 30, 32, 34, 36, 38, 40, 42, 44, 46, 48, 50, 52, 54, 56, 58, 60, 62, 64, 66, 68, 70, 72, 74, 76, 78, 80, 82, 84, 86, 88, 90, 92, 94, 96, 98, 100, 102, 104, 106, 108, 110, 112, 114, 116, 118, 120, 122, 124, 126, 128, 130, 132, 134, 136, 138, 140, 142, 144, 146, 148, 150, 152, 154, 156, 158, 160, 162, 164, 166, 168, 170, 172, 174, 176, 178, 180, 182, 184, 186, 188, 190, 192, 194, 196, 198, 200, 202, 204, 206, 208, 210, 212, 214, 216, 218, 220, 222, 224, 226, 228, 230, 232, 234, 236, 238, 240, 242, 244, 246, 248, 250, 252, 254, 256, 258, 260, 262, 264, 266, 268, 270, 272, 274, 276, 278, 280, 282, 284, 286, 288, 290, 292, 294, 296, 298, 300, 302, 304, 306, 308, 310, 312, 314, 316, 318, 320, 322, 324, 326, 328, 330, 332, 334, 336, 338, 340, 342, 344, 346, 348, 350, 352, 354, 356, 358, 360, 362, 364, 366, 368, 370, 372, 374, 376, 378, 380, 382, 384, 386, 388, 390, 392, 394, 396, 398, 400, 402, 404, 406, 408, 410, 412, 414, 416, 418, 420, 422, 424, 426, 428, 430, 432, 434, 436, 438, 440, 442, 444, 446, 448, 450, 452, 454, 456, 458, 460, 462, 464, 466, 468, 470, 472, 474, 476, 478, 480, 482, 484, 486, 488, 490, 492, 494, 496, 498, 500, 502, 504, 506, 508, 510, 512, 514, 516, 518, 520, 522, 524, 526, 528, 530, 532, 534, 536, 538, 540, 542, 544, 546, 548, 550, 552, 554, 556, 558, 560, 562, 564, 566, 568, 570, 572, 574, 576, 578, 580, 582, 584, 586, 588, 590, 592, 594, 596, 598, 600, 602, 604, 606, 608, 610, 612, 614, 616, 618, 620, 622, 624, 626, 628, 630, 632, 634, 636, 638, 640, 642, 644, 646, 648, 650, 652, 654, 656, 658, 660, 662, 664, 666, 668, 670, 672, 674, 676, 748, 750, 752, 754, 756, 758, 760, 762, 764, 766, 768, 770, 772, 774, 776, 778, & 780); (c) any nucleic acid sequences that hybridizes to the complement of nucleic acid sequences that encode the amino acid sequences shown in Tables 1-6 under highly stringent conditions, e.g., hybridization to filter-bound DNA in 0.5 M NaHPO₄, 7% sodium dodecyl sulfate (SDS), 1 mM EDTA at 65° C., and washing in 0.1×SSC/0.1% SDS at 68° C. (see, e.g., F. M. Ausubel et al., eds., 1989, Current Protocols in Molecular Biology, Vol. I, Green Publishing Associates, Inc., and John Wiley & sons, Inc., New York, at p. 2.10.3); or (d) any nucleic acid sequences that hybridizes to the complement of the nucleic acid sequences that encode the amino acid sequences shown in Tables 1-6 under less stringent conditions, such as moderately stringent conditions, e.g., washing in 0.2×SSC/0.1% SDS at 42° C. (F. M. Ausubel et al., 1989, supra), and which encodes a gene product functionally equivalent to a gene product encoded by the nucleic acid sequences depicted in Tables 1-6. Although the sequences identified in the Sequence Listing are preferred, the invention encompasses the sequences available through the corresponding accession numbers listed in Tables 1-6.

[0045] “Functionally equivalent” as used herein refers to any protein capable of exhibiting a substantially similar in vivo or in vitro activity as the gene products encoded by the nucleic acid molecules described herein, e.g., modulation of the NF-κB pathway or NF-κB-related diseases and conditions, or direct causative effects associated with NF-κB and related diseases and conditions.

[0046] As used herein, the term “nucleic acid molecule” or “nucleic acid” can also refer to portions, fragments and/or degenerate variants of the nucleic acid sequences of (a) through (d) above, including naturally occurring variants or mutant alleles thereof. Such fragments include, for example, nucleic acid sequences that encode portions of the proteins shown in Tables 1-6 that correspond to functional domains of the proteins. In addition, the nucleic acid molecules can include isolated nucleic acids, preferably DNA molecules, that hybridize under highly stringent or moderately stringent hybridization conditions to at least about 6, preferably at least about 12, more preferably at least about 18, and most preferably about 42 consecutive nucleotides of the nucleic acid sequences of (a) through (d), as described above.

[0047] In specific embodiments, the polynucleotides of the invention are at least 15, at least 30, at least 50, at least 100, at least 125, at least 500, at least 1000, at least 1500, at least 2000, at least 2500, at least 3000, at least 3500, or at least 4000 continuous nucleotides but are less than or equal to 300 kb, 200 kb, 100 kb, 50 kb, 15 kb, 10 kb, 7.5 kb, 5 kb, 2.5 kb, 2.0 kb, or 1 kb, in length. In a further embodiment, polynucleotides of the invention comprise a portion of the coding sequences, as disclosed herein, but do not comprise all or a portion of any intron. In another embodiment, the polynucleotides comprising coding sequences do not contain coding sequences of a genomic flanking gene (i.e., 5′ or 3′ to the gene of interest in the genome). In other embodiments, the polynucleotides of the invention do not contain the coding sequence of more than 1000, 500, 250, 100, 50, 25, 20, 15, 10, 5, 4, 3, 2, or 1 genomic flanking gene(s).

[0048] The terms “stringent conditions” or “stringency” refer to the conditions for hybridization as defined by nucleic acid composition, salt, and temperature. These conditions are well known in the art and may be altered to identify and/or detect identical or related polynucleotide sequences in a sample. A variety of equivalent conditions comprising either low, moderate, or high stringency depend on factors such as the length and nature of the sequence (DNA, RNA, base composition), reaction milieu (in solution or immobilized on a solid substrate), nature of the target nucleic acid (DNA, RNA, base composition), concentration of salts and the presence or absence of other reaction components (for example, formamide, dextran sulfate and/or polyethylene glycol) and reaction temperature (within a range of from about 5° C. below the melting temperature of the probe to about 20° C.-25° C. below the melting temperature). One or more factors may be varied to generate conditions, either low or high stringency that are different from, but equivalent to, the aforementioned conditions.

[0049] As will be understood by those of skill in the art, the stringency of hybridization can be altered in order to identify or detect identical or related polynucleotide sequences. As will be further appreciated by the skilled practitioner, the melting temperature, Tₘ, can be approximated by the formulas that are well known in the art, depending on a number of parameters, such as the length of the hybrid or probe in number of nucleotides, or hybridization buffer ingredients and conditions (see, for example, T. Maniatis et al., Molecular Cloning: A Laboratory Manual, Cold Spring Harbor Laboratory, Cold Spring Harbor, N.Y., 1982; J. Sambrook et al., Molecular Cloning: A Laboratory Manual, Cold Spring Harbor Laboratory, Cold Spring Harbor, N.Y., 1989; Current Protocols in Molecular Biology, Eds. F. M. Ausubel et al., Vol. 1, “Preparation and Analysis of DNA”, John Wiley and Sons, Inc., 1994-1995, Suppls. 26, 29, 35 and 42; pp. 2.10.7-2.10.16; G. M. Wahl and S. L. Berger,1987, Methods Enzymol. 152:399-407; and A. R. Kimmel, 1987; Methods of Enzymol. 152:507-511).

[0050] As a general guide, Tₘ decreases approximately 1° C.-1.5° C. with every 1% decrease in sequence homology in an aqueous solution containing 100 mM NaCl. Also, in general, the stability of a hybrid is a function of ionic strength and temperature. Typically, the hybridization reaction is initially performed under conditions of low stringency, followed by washes of varying, but higher stringency. Reference to hybridization stringency, for example, high, moderate, or low stringency, typically relates to such washing conditions. It is to be understood that the low, moderate and high stringency hybridization or washing conditions can be varied using a variety of ingredients, buffers and temperatures well known to and practiced by the skilled artisan.

[0051] The nucleic acid molecules of the invention can also include nucleic acids, preferably DNA molecules, that hybridize to, and are therefore complements of, the nucleic acid sequences of (a) through (d), as set forth above. Such hybridization conditions may be highly stringent or moderately stringent, as described above. In those instances in which the nucleic acid molecules are deoxyoligonucleotides (“oligos”), highly stringent conditions may include, e.g., washing in 6×SSC/0.05% sodium pyrophosphate at 37° C. (for 14-base oligos), 48° C. (for 17-base oligos), 55° C. (for 20-base oligos), and 60° C. (for 23-base oligos).

[0052] As will be discussed further below, the nucleic acid molecules of the invention can encode or act as antisense molecules useful, for example, in gene regulation of the polypeptides identified in Tables 1-6 or as antisense primers in amplification reactions of the nucleic acid sequences shown in Tables 1-6. Further, such sequences can be used as part of ribozyme and/or triple helix sequences or to design small interfering RNA molecules, also useful for gene regulation. Still further, such molecules can be used as components of diagnostic methods whereby, for example, the presence of a particular protein allele or alternatively-spliced protein transcript responsible for altering cellular responses mediated by NF-κB, or causing or predisposing one to an NF-κB-related disorder or condition can be detected.

[0053] Moreover, due to the degeneracy of the genetic code, other DNA sequences that encode substantially the amino acid sequences of the proteins identified in Tables 1-6 can be used in the practice of the present invention, e.g., for the cloning and expression of NF-κB pathway-associated polypeptides. Such DNA sequences include those that are capable of hybridizing to the nucleic acids identified in Tables 1-6 under stringent (high or moderate) conditions, or that would be capable of hybridizing under stringent conditions but for the degeneracy of the genetic code. Typically, the nucleic acids of the invention should exhibit at least about 80% overall sequence homology at the nucleotide level, more preferably at least about 85-90% overall homology and most preferably at least about 95% overall homology to the nucleic acid sequences of Tables 1-6 (SEQ ID NOS: 1, 3, 5, 7, 9, 11, 13, 15, 17, 19, 21, 23, 25, 27, 29, 31, 33, 35, 37, 39, 41, 43, 45, 47, 49, 51, 53, 55, 57, 59, 61, 63, 65, 67, 69, 71, 73, 75, 77, 79, 81, 83, 85, 87, 89, 91, 93, 95, 97, 99, 101, 103, 105, 107, 109, 111, 113, 115, 117, 119, 121, 123, 125, 127, 129, 131, 133, 135, 137, 139, 141, 143, 145, 147, 149, 151, 153, 155, 157, 159, 161, 163, 165, 167, 169, 171, 173, 175, 177, 179, 181, 183, 185, 187, 189, 191, 193, 195, 197, 199, 201, 203, 205, 207, 209, 211, 213, 215, 217, 219, 221, 223, 225, 227, 229, 231, 233, 235, 237, 239, 241, 243, 245, 247, 249, 251, 253, 255, 257, 259, 261, 263, 265, 267, 269, 271, 273, 275, 277, 279, 281, 283, 285, 287, 289, 291, 293, 295, 297, 299, 301, 303, 305, 307, 309, 311, 313, 315, 317, 319, 321, 323, 325, 327, 329, 331, 333, 335, 337, 339, 341, 343, 345, 347, 349, 351, 353, 355, 357, 359, 361, 363, 365, 367, 369, 371, 373, 375, 377, 379, 381, 383, 385, 387, 389, 391, 393, 395, 397, 399, 401, 403, 405, 407, 409, 411, 413, 415, 417, 419, 421, 423, 425, 427, 429, 431, 433, 435, 437, 439, 441, 443, 444, 446, 448, 450, 452, 454, 456, 458, 459, 461, 463, 465, 467, 469, 471, 473, 475, 477, 479, 481, 483, 485, 487, 489, 491, 493, 495, 497, 499, 501, 503, 505, 507, 509, 511, 513, 515, 517, 519, 521, 523, 525, 527, 529, 530, 532, 533, 535, 537, 539, 541, 543, 545, 547, 549, 551, 553, 555, 557, 559, 561, 563, 565, 567, 569, 571, 573, 575, 577, 579, 581, 583, 585, 587, 589, 591, 593, 595, 597, 599, 601, 603, 605, 607, 609, 611, 612, 614, 616, 618, 620, 622, 624, 626, 628, 630, 632, 634, 636, 638, 639, 641, 643, 645, 647, 649, 651, 653, 655, 657, 659, 661, 663, 665, 667, 669, 671, 673, 675, 747, 749, 751, 753, 755, 757, 759, 761, 763, 765, 767, 769, 771, 773, 775, 777, 779 & 823); (e.g., as determined by the CLUSTAL W algorithm using default parameters (J. D. Thompson et al., 1994, Nucleic Acids Research, 2(22):4673-4680).

[0054] Alternatively, the polypeptides of the invention should exhibit at least about 96%, 97%, 98%, 99%, 99.1%, 99.2%, 99.3%, 99.4%, 99.5%, 99.6%, 99.7%, 99.8%, or 99.9% overall homology to the amino acid sequence identified in Tables 1-6 (SEQ ID NOS: 2, 4, 6, 8, 10, 12, 14, 16, 18, 20, 22, 24, 26, 28, 30, 32, 34, 36, 38, 40, 42, 44, 46, 48, 50, 52, 54, 56, 58, 60, 62, 64, 66, 68, 70, 72, 74, 76, 78, 80, 82, 84, 86, 88, 90, 92, 94, 96, 98, 100, 102, 104, 106, 108, 110, 112, 114, 116, 118, 120, 122, 124, 126, 128, 130, 132, 134, 136, 138, 140, 142, 144, 146, 148, 150, 152, 154, 156, 158, 160, 162, 164, 166, 168, 170, 172, 174, 176, 178, 180, 182, 184, 186, 188, 190, 192, 194, 196, 198, 200, 202, 204, 206, 208, 210, 212, 214, 216, 218, 220, 222, 224, 226, 228, 230, 232, 234, 236, 238, 240, 242, 244, 246, 248, 250, 252, 254, 256, 258, 260, 262, 264, 266, 268, 270, 272, 274, 276, 278, 280, 282, 284, 286, 288, 290, 292, 294, 296, 298, 300, 302, 304, 306, 308, 310, 312, 314, 316, 318, 320, 322, 324, 326, 328, 330, 332, 334, 336, 338, 340, 342, 344, 346, 348, 350, 352, 354, 356, 358, 360, 362, 364, 366, 368, 370, 372, 374, 376, 378, 380, 382, 384, 386, 388, 390, 392, 394, 396, 398, 400, 402, 404, 406, 408, 410, 412, 414, 416, 418, 420, 422, 424, 426, 428, 430, 432, 434, 436, 438, 440, 442, 445, 447, 449, 451, 453, 455, 457, 460, 462, 464, 466, 468, 470, 472, 474, 476, 478, 480, 482, 484, 486, 488, 490, 492, 494, 496, 498, 500, 502, 504, 506, 508, 510, 512, 514, 516, 518, 520, 522, 524, 526, 528, 531, 534, 536, 538, 540, 542, 544, 546, 548, 550, 552, 554, 556, 558, 560, 562, 564, 566, 568, 570, 572, 574, 576, 578, 580, 582, 584, 586, 588, 590, 592, 594, 596, 598, 600, 602, 604, 606, 608, 610, 613, 615, 617, 619, 621, 623, 625, 627, 629, 631, 633, 635, 637, 640, 642, 644, 646, 648, 650, 652, 654, 656, 658, 660, 662, 664, 666, 668, 670, 672, 674, 676, 750, 752, 754, 756, 758, 760, 762, 764, 766, 768, 770, 772, 774, 776, 778 & 780) (e.g., as determined by the CLUSTAL W algorithm using default parameters (J. D. Thompson et al., 1994, Nucleic Acids Research, 2(22):4673-4680).

[0055] Those having skill in the art will know how to determine percent identity between/among sequences using, for example, algorithms such as those used in the GAP computer program (S. B. Needleman and C. D. Wunsch, 1970, “A general method applicable to the search for similarities in the amino acid sequence of two proteins”, J. Mol. Biol., 48(3):443-53) or based on the CLUSTALW computer program, mentioned above, or FASTDB, (Brutlag et al., 1990, Comp. App. Biosci., 6:237-245). Although the FASTDB algorithm typically does not consider internal non-matching deletions or additions in sequences, i.e., gaps, in its calculation, this can be corrected manually to avoid an overestimation of the % identity. GAP and CLUSTALW, however, do take sequence gaps into account in their identity calculations.

[0056] Also available to those having skill in this art are the BLAST and BLAST 2.0 algorithms (Altschul et al., 1977, Nuc. Acids Res., 25:3389-3402 and Altschul et al., 1990, J. Mol. Biol., 215:403-410). The BLASTN program for nucleic acid sequences uses as defaults a wordlength (W) of 11, an expectation (E) of 10, M=5, N=4, and a comparison of both strands. For amino acid sequences, the BLASTP program uses as defaults a wordlength (W) of 3, and an expectation (E) of 10. The BLOSUM62 scoring matrix (Henikoff & Henikoff, 1989, Proc. Natl. Acad. Sci., USA, 89:10915) uses alignments (B) of 50, expectation (E) of 10, M=5, N=4, and a comparison of both strands.

[0057] Altered nucleic acid sequences of the sequences shown in Tables 1-6 that can be used in accordance with the invention include deletions, additions or substitutions of different nucleotide residues resulting in a modified nucleic acid molecule, i.e., mutated or truncated, that encodes the same or a functionally equivalent gene product. The gene product itself may contain deletions, additions or substitutions of amino acid residues within the protein sequence of those identified in Tables 1-6, which result in a silent change, thus producing a functionally equivalent NF-κB pathway-associated polypeptide. Such amino acid substitutions may be made on the basis of similarity in polarity, charge, solubility, hydrophobicity, hydrophilicity, and/or the amphipatic nature of the residues involved. For example, negatively-charged amino acids include aspartic acid and glutamic acid; positively-charged amino acids include lysine, arginine and histidine; amino acids with uncharged polar head groups having similar hydrophilicity values include the following: leucine, isoleucine, valine, glycine, alanine, asparagine, glutamine, serine, threonine, phenylalanine, tyrosine. A functionally equivalent polypeptide of those identified in Tables 1-6 can include a polypeptide which displays the same type of biological activity (e.g., regulation of NF-κB-mediated expression) as the native proteins, but not necessarily to the same extent.

[0058] The nucleic acid molecules or polynucleotide sequences of Tables 1-6 can be engineered in order to alter the coding sequences for a variety of reasons, including but not limited to, alterations that modify processing and expression of the gene products. For example, mutations may be introduced using techniques that are well known in the art, e.g., site-directed mutagenesis, to insert new restriction sites, to alter glycosylation patterns, phosphorylation, etc. For example, in certain expression systems such as yeast, host cells may over-glycosylate the gene product. When using such expression systems, it may be preferable to alter the protein coding sequences to eliminate any N-linked glycosylation sites.

[0059] In another embodiment, the nucleic acid sequences shown in Tables 1-6, including modified nucleic acids, can be ligated to a heterologous protein-encoding sequence to encode a fusion protein. Preferably, the nucleic acid is one that encodes a polypeptide with an activity of an NF-κB pathway-associated protein as described herein, or a portion or fragment thereof, and is linked, uninterrupted by stop codons and in frame, to a nucleotide sequence that encodes a heterologous protein or peptide. The fusion protein can be engineered to contain a cleavage site, located between the NF-κB pathway-associated protein sequence and the heterologous protein sequence, so that the NF-κB pathway-associated proteins can be cleaved away from the heterologous moiety. Nucleic acid sequences encoding fusion proteins can include full length NF-κB pathway-associated protein coding sequences, sequences encoding truncated proteins, sequences encoding mutated proteins, or sequences encoding peptide fragments of NF-κB pathway-associated proteins. The nucleic acid molecules of the invention can also be used as hybridization probes for obtaining cDNAs or genomic DNA. In addition, nucleic acids can be used as primers in PCR amplification methods to isolate NF-κB pathway-associated protein cDNAs and genomic DNA, e.g., from other species.

[0060] The sequences identified in Tables 1-6 can also be used to isolate NF-κB pathway-associated protein genes, including mutant or variant alleles. Such mutant or variant alleles can be isolated, for example, from individuals either known or proposed to have a genotype related to NF-κB-associated disorders, conditions, or dysfinctions. Mutant or variant alleles and mutant or variant allele gene products can then be used in the screening, therapeutic and diagnostic systems described herein. In addition, such NF-κB pathway-associated gene sequences can be used to detect genetic defects that can affect NF-κB-related disorders. For example, the present invention also encompasses naturally occurring polymorphisms of NF-κB pathway-associated protein genes including, but not limited to, single nucleotide polymorphisms (SNPs) in coding and noncoding regions.

[0061] In a further embodiment, the coding sequences of the proteins identified in Tables 1-6 can be synthesized in whole or in part, using chemical methods well known in the art, based on the nucleic acid and/or amino acid sequences of the NF-κB pathway-associated genes and proteins, respectively. (See, for example, Caruthers et al., 1980, Nuc. Acids Res. Symp. Ser., 7: 215-233; Crea and Horn, 1980, Nuc. Acids Res., 9(10): 2331; Matteucci and Caruthers, 1980, Tetrahedron Letters, 21: 719; and Chow and Kempe, 1981, Nuc. Acids Res., 9(12): 2807-2817). The invention encompasses (a) DNA vectors that contain any of the foregoing nucleic acids as shown in Tables 1-6 and/or their complements; (b) DNA expression vectors that contain any of the foregoing coding sequences as shown in operatively associated with a regulatory element that directs the expression of the coding sequences; and (c) genetically engineered host cells that contain any of the foregoing coding sequences as shown in Tables 1-6 operatively associated with a regulatory element that directs the expression of the coding sequences in the host cell. As used herein, regulatory elements include, but are not limited to, inducible and non-inducible promoters, enhancers, operators and other elements that drive and regulate expression, as known to those skilled in the art. Nonlimiting examples of such regulatory elements include the cytomegalovirus hCMV immediate early gene, the early or late promoters of SV40 adenovirus, the lac system, the trp system, the TAC system, the TRC system, the major operator and promoter regions of phage A, the control regions of fd coat protein, the promoter for 3-phosphoglycerate kinase, the promoters of acid phosphatase, and the promoters of the yeast α-mating factors.

[0062] The invention further relates to nucleic acid analogs, including but not limited to, peptide nucleic acid analogues, equivalent to the nucleic acid molecules described herein. “Equivalent” as used in this context refers to nucleic acid analogs that have the same primary base sequence as the nucleic acid molecules described above and shown in Tables 1-6. Nucleic acid analogs and methods for the synthesis of nucleic acid analogs are well known to those of skill in the art. (See, e.g., Egholm, M. et al., 1993, Nature, 365:566-568; and Perry-O'Keefe, H. et al., 1996, Proc. Natl. Acad. USA, 93:14670-14675).

### NF-κB Pathway-Associated Polypeptides and Peptides, and Expression Thereof

[0063] The nucleic acid sequences identified herein can be used to generate recombinant DNA molecules that direct the expression of the NF-κB pathway-associated protein (polypeptide) or peptides thereof in appropriate host cells, including the full-length proteins, functionally active or equivalent proteins and polypeptides, e.g., mutated, truncated or deleted forms of NF-κB pathway-associated proteins, peptide fragments, or fusion proteins. A functionally equivalent polypeptide can include a polypeptide that displays the same type of biological activity (e.g., regulation or modulation of second messenger activity and/or function) as the native protein, but not necessarily to the same extent. Such recombinantly expressed NF-κB pathway-associated molecules are useful in the various screening assays for determining modulators of NF-κB pathway-associated proteins, particularly for treatments and therapies of NF-κB-related disorders as described herein.

[0064] In a specific embodiment, the amino acid sequence of the newly identified NF-κB pathway-associated polypeptides are identified in Tables 1-6. Both the NF-κB pathway-associated polypeptide and peptide sequences are useful as targets, and/or as immunogens to generate antibodies for the methods and compositions according to the present invention. The proteins and polypeptides of the invention include peptide fragments of NF-κB pathway-associated proteins, peptides corresponding to one or more domains of the protein, mutated, truncated or deleted forms of the proteins and polypeptides, as well as fision proteins; all of the aforementioned NF-κB pathway-associated protein derivatives can be obtained by techniques well known in the art, given the nucleic acid and amino acid sequences as described herein. The proteins and corresponding peptides can also contain deletions, additions or substitutions of amino acid residues within the protein sequence, which can result in a silent change, thus producing a functionally equivalent NF-κB pathway-associated polypeptide. Such amino acid substitutions can be made on the basis of similarity in polarity, charge, solubility, hydrophobicity, hydrophilicity, and/or the amphipatic nature of the residues involved. For example, negatively-charged amino acids include aspartic acid and glutamic acid; positively-charged amino acids include lysine, arginine and histidine; amino acids with uncharged polar head groups having similar hydrophilicity values include the following: leucine, isoleucine, valine, glycine, alanine, asparagine, glutamine, serine, threonine, phenylalanine, tyrosine.

[0065] The NF-κB pathway-associated polypeptides should exhibit at least about 80% overall sequence identity at the amino acid level, more preferably at least about 85-90% overall identity and most preferably at least about 95% overall identity to the amino acid sequence of Tables 1-6 (e.g., as determined by the CLUSTAL W algorithm using default parameters (J. D. Thompson et al., 1994, Nucleic Acids Research, 2(22):4673-4680).

[0066] Alternatively, the NF-κB pathway-associated polypeptide should exhibit at least about 96%, 97%, 98%, 99%, 99.1%, 99.2%, 99.3%, 99.4%, 99.5%, 99.6%, 99.7%, 99.8%, or 99.9% overall identity to the NF-κB pathway-associated amino acid sequence as depicted in Tables 1-6 (e.g., as determined by the CLUSTAL W algorithm using default parameters (J. D. Thompson et al., 1994, Nucleic Acids Research, 2(22):4673-4680).

[0067] Mutated or altered forms of the NF-κB pathway-associated proteins and peptides can be obtained using random mutagenesis techniques, site-directed mutagenesis techniques, or by chemical methods, e.g., protein synthesis techniques, as practiced in the art. Mutant NF-κB pathway-associated proteins or peptides can be engineered so that regions important for function are maintained, while variable residues are altered, e.g., by deletion or insertion of an amino acid residue(s) or by the substitution of one or more different amino acid residues. For example, conservative alterations at the variable positions of a polypeptide can be engineered to produce a mutant polypeptide that retains the function of a NF-κB pathway-associated protein. Non-conservative alterations of variable regions can be engineered to alter NF-κB pathway-associated protein function, if desired. Alternatively, in those cases where modification of function (either to increase or decrease function) is desired, deletion or non-conservative alterations of conserved regions of the NF-κB pathway-associated polypeptides can be engineered.

[0068] In another aspect, fuision proteins containing NF-κB pathway-associated amino acid sequences can also be obtained by techniques known in the art, including genetic engineering and chemical protein synthesis techniques. According to this aspect, NF-κB pathway-associated fusion proteins are encoded by an isolated nucleic acid molecule comprising a nucleic acid that encodes a polypeptide with an activity of a NF-κB pathway-associated protein, or a fragment thereof, linked in frame and uninterrupted by stop codons, to a nucleotide sequence that encodes a heterologous protein or peptide.

[0069] Fusion proteins include those that contain the full-length NF-κB pathway-associated amino acid sequences, peptide sequences, e.g., encoding one or more functional domains, mutant amino acid sequences, or truncated amino acid sequences linked to an unrelated protein or polypeptide sequence. Such fuision proteins include, but are not limited to, Ig Fc fusions which stabilize the NF-κB pathway-associated fusion protein and can prolong the half-life of the protein in vivo, or fusions to an enzyme, fluorescent protein or luminescent (chemiluminescent) protein that provides a marker function.

[0070] NF-κB pathway-associated polypeptides, proteins, peptides, and derivatives thereof, can be produced using genetic engineering techniques. Thus, in order to express a biologically active NF-κB pathway-associated polypeptide by recombinant technology, a nucleic acid molecule coding for the polypeptide, or a functional equivalent thereof, is inserted into an appropriate expression vector, i.e., a vector which contains the necessary elements for the transcription and translation of the inserted coding sequence. More specifically, the NF-κB pathway-associated nucleic acids are operatively associated with regulatory nucleotide sequences containing transcriptional and/or translational regulatory information that controls expression of the NF-κB pathway-associated nucleic acids in the host cell. The NF-κB pathway-associated gene products so produced, as well as host cells, or cell lines transfected or transformed with recombinant expression vectors, can be used for a variety of purposes. These include, but are not limited to, generating antibodies (i.e., monoclonal or polyclonal) that bind to the NF-κB pathway-associated proteins or peptides, including those that competitively inhibit binding and thus “neutralize” NF-κB pathway-associated protein activity, and the screening and selection of NF-κB pathway-associated protein analogs, ligands, or interacting molecules.

[0071] In instances in which the NF-κB pathway-associated coding sequence is engineered to encode a cleavable fusion protein, purification can be readily accomplished using affinity purification techniques. For example, a collagenase cleavage recognition consensus sequence can be engineered between the carboxy terminus of NF-κB pathway-associated protein and protein A. The resulting fusion protein can be purified using an IgG column that binds to the protein A moiety. Unfused NF-κB pathway-associated protein can be released from the column by treatment with collagenase. Another example embraces the use of pGEX vectors that express foreign polypeptides as fusion proteins with glutathione S-transferase (GST). The fusion protein can be engineered with either thrombin or factor Xa cleavage sites between the cloned gene and the GST moiety. The fusion protein can be easily purified from cell extracts by adsorption to glutathione agarose beads, followed by elution in the presence of glutathione. In fact, any cleavage site or enzyme cleavage substrate can be engineered between the NF-κB pathway-associated gene product sequence and a second peptide or protein that has a binding partner which can be used for purification, e.g., any antigen for which an immunoaffinity column can be prepared.

[0072] In preferred embodiments, for example, cell lines transfected with NF-κB pathway-associated polypeptides are useful for the identification of agonists and antagonists of the polypeptides. Representative uses of these cell lines include employing the cell lines in a method of identifying NF-κB pathway-associated protein agonists and antagonists. Preferably, the cell lines are useful in a method for identifying a compound that modulates the biological activity of the polypeptides, comprising the steps of: (a) combining a candidate modulator compound with a host cell expressing a NF-κB pathway-associated polypeptide having the sequence as set forth in Tables 1-6; and (b) measuring an effect of the candidate modulator compound on the activity of the expressed polypeptide.

[0073] In addition, NF-κB pathway-associated fusion proteins can be readily purified by utilizing an antibody specific for the fusion protein being expressed. For example, a system described by Janknecht et al. allows for the purification of non-denatured fusion proteins expressed in human cell lines (Janknecht, et al., 1991, Proc. Natl. Acad. Sci. USA, 88: 8972-8976). In this system, the gene of interest is subcloned into a vaccinia recombination plasmid such that the open reading frame of the gene is translationally fused to an amino-terminal tag consisting of six histidine residues. Extracts from cells infected with recombinant vaccinia virus are loaded onto Ni²⁺ nitriloacetic acid-agarose columns and histidine-tagged proteins are selectively eluted with imidazole-containing buffers.

[0074] Alternatively, NF-κB pathway-associated proteins and peptides can be produced using chemical methods to synthesize the NF-κB pathway-associated amino acid sequences in whole or in part. For example, peptides can be synthesized by solid phase techniques, cleaved from the resin, and purified by preparative high performance liquid chromatography (see, e.g., Creighton, 1983, Proteins: Structures And Molecular Principles, W.H. Freeman and Co., New York., pp. 50-60). The composition of the synthetic peptides can be confirmed by amino acid analysis or sequencing (e.g., the Edman degradation procedure; see Creighton, 1983, Proteins: Structures and Molecular Principles, W.H. Freeman and Co., New York., pp. 34-49).

[0075] The NF-κB pathway-associated proteins, polypeptides and peptide fragments, mutated, truncated or deleted forms of NF-κB pathway-associated proteins and/or NF-κB pathway-associated fusion products can be prepared for various uses, including but not limited to, the generation of antibodies, as reagents in diagnostic assays, the identification of other cellular gene products associated with NF-κB pathway-associated in the development or continuance of NF-κB pathway-related disorders, and as reagents in assays for screening for compounds for use in the treatment of NF-κB-related diseases and disorders.

[0076] In a particular related embodiment, NF-κB pathway-associated peptides, derived from the sequences shown in Tables 1-6, can be used to identify individuals who are at risk for developing NF-κB-related disorders or the underlying symptoms thereof. Such identification can be achieved by a variety of diagnostic or screening methods and assays as are known in the art. For example, antibodies specific for the NF-κB pathway-associated polypeptides or peptides identified in Tables 1-6 can be used in such assays, in addition to primers directed against the polynucleotide sequence that codes for the proteins or peptide. Primers are preferably obtained from the nucleic acid sequences encoding the NF-κB pathway-associated polypeptides of Tables 1-6 (see, for instance, primers shown in Example 2).

### Vectors and Host Cells

[0077] A variety of host-expression vector systems can be used to express the NF-κB pathway-associated polypeptide coding sequences. Such host-expression systems represent vehicles by which the coding sequences of interest can be produced and subsequently purified, but also represent cells which can, when transformed or transfected with the appropriate nucleotide coding sequences, exhibit the corresponding NF-κB pathway-associated gene product(s) in situ and/or function in vivo. These hosts include, but are not limited to, microorganisms such as bacteria (e.g., E. coli, B. subtilis) transformed with recombinant bacteriophage DNA, plasmid DNA, or cosmid DNA expression vectors containing the NF-κB pathway-associated coding sequences; yeast (e.g., Saccharomyces, Pichia) transformed with recombinant yeast expression vectors containing the NF-κB pathway-associated coding sequences; insect cell systems infected with recombinant virus expression vectors (e.g., baculovirus) containing the NF-κB pathway-associated coding sequences; plant cell systems infected with recombinant virus expression vectors (e.g., cauliflower mosaic virus (CaMV); tobacco mosaic virus (TMV)) or transformed with recombinant plasmid expression vectors (e.g., Ti plasmid) containing the NF-κB pathway-associated coding sequences; or mammalian cell systems, including human cells, (e.g., COS, CHO, BHK, 293, NIH/3T3) harboring recombinant expression constructs containing promoters derived from the genome of mammalian cells as described below.

[0078] The expression elements of these systems can vary in their strength and specificities. Depending on the host/vector system utilized, any of a number of suitable transcriptional and translational elements, including constitutive and inducible promoters, can be used in the expression vector. For example, when cloning in bacterial systems, inducible promoters such as pL of bacteriophage λ, plac, ptrp, ptac (ptrp-lac hybrid promoter) and the like can be used; when cloning in insect cell systems, promoters such as the baculovirus polyhedrin promoter can be used; when cloning in plant cell systems, promoters derived from the genome of plant cells (e.g., heat shock promoters; the promoter for the small subunit of RUBISCO; the promoter for the chlorophyll a/b binding protein) or from plant viruses (e.g., the 35S RNA promoter of CaMV; the coat protein promoter of TMV) can be used; when cloning in mammalian cell systems, promoters derived from the genome of mammalian cells (e.g., metallothionein promoter) or from mammalian viruses (e.g., the adenovirus late promoter; the vaccinia virus 7.5K promoter) can be used; when generating cell lines that contain multiple copies of NF-κB pathway-associated protein DNA, SV40-, BPV- and EBV-based vectors can be used with an appropriate selectable marker.

[0079] In bacterial systems, a number of expression vectors can be advantageously selected depending upon the use intended for the expressed NF-κB pathway-associated polypeptides or peptides. For example, when large quantities of the NF-κB pathway-associated polypeptides or peptides are to be produced, e.g., for the generation of antibodies or for the production of the NF-κB pathway-associated gene products, vectors that direct the expression of high levels of fusion protein products that are readily purified may be desirable. Such vectors include, but are not limited to, the E. coli expression vector pUR278 (Ruther et al., 1983, EMBO J., 2:1791), in which the NF-κB pathway-associated protein coding sequence can be ligated into the vector in-frame with the lacZ coding region so that a hybrid NF-κB pathway-associated protein/lacZ protein is produced; pIN vectors (Inouye & Inouye, 1985, Nucleic Acids Res., 13: 3101-3109; Van Heeke & Schuster, 1989, J. Biol. Chem., 264: 5503-5509); and the like. pGEX vectors can also be used to express foreign polypeptides as fusion proteins with glutathione S-transferase (GST). In general, such fusion proteins are soluble and can easily be purified from lysed cells by affinity chromatography, e.g., adsorption to glutathione-agarose beads followed by elution in the presence of free glutathione. The pGEX vectors are designed to include thrombin or factor Xa protease cleavage sites so that the cloned polypeptide of interest can be released from the GST moiety. See also Booth et al., 1988, Immunol. Lett., 19: 65-70; and Gardella et al., 1990, J. Biol. Chem., 265: 15854-15859; Pritchett et al., 1989, Biotechniques, 7: 580.

[0080] In yeast, a number of vectors containing constitutive or inducible promoters are suitable for use. For a review, see Current Protocols in Molecular Biology, Vol. 2, 1988, Ed. Ausubel et al., Greene Publish. Assoc. & Wiley Interscience, Ch. 13; Grant et al., 1987, Expression and Secretion Vectors for Yeast, In: Methods in Enzymology, Eds. Wu & Grossman, 1987, Acad. Press, N.Y., Vol. 153, pp. 516-544; Glover, 1986, DNA Cloning, Vol. II, IRL Press, Wash., D.C., Ch. 3; and Bitter, 1987, Heterologous Gene Expression in Yeast, Methods in Enzymology, Eds. Berger & Kimmel, Acad. Press, N.Y., Vol. 152, pp. 673-684; and The Molecular Biology of the Yeast Saccharomyces, 1982, Cold Spring Harbor Press, Vols. I and II.

[0081] In an insect system, Autographa californica nuclear polyhedrosis virus (AcNPV) can be used as a vector to express foreign genes. The virus grows in Spodoptera frugiperda cells. The NF-κB pathway-associated protein encoding sequences can be cloned into non-essential regions (for example, the polyhedrin gene) of the virus and placed under the control of an AcNPV promoter (for example, the polyhedrin promoter). Successful insertion of the NF-κB pathway-associated coding sequence results in inactivation of the polyhedrin gene and production of non-occluded recombinant virus (i.e., virus lacking the proteinaceous coat coded for by the polyhedrin gene). These recombinant viruses can then be used to infect Spodoptera frugiperda cells in which the inserted gene is expressed (see e.g., Smith et al., 1983, J. Virol., 46: 584; Smith, U.S. Pat. No. 4,215,051).

[0082] In mammalian host cells, a number of virus-based expression systems can be employed. In cases where an adenovirus is used as an expression vector, the NF-κB pathway-associated protein coding sequence can be ligated to an adenovirus transcription/translation control complex, e.g., the late promoter and tripartite leader sequence. This chimeric gene can then be inserted into the adenovirus genome by in vitro or in vivo recombination. Insertion into a non-essential region of the viral genome (e.g., region E1 or E3) results in a recombinant virus that is viable and capable of expressing NF-κB pathway-associated protein in infected hosts (see, e.g., Logan & Shenk, 1984, Proc. Natl. Acad. Sci. USA, 81: 3655-3659). Alternatively, the vaccinia 7.5K promoter can be used (see, e.g., Mackett et al., 1982, Proc. Natl. Acad. Sci. USA, 79: 7415-7419; Mackett et al., 1984, J. Virol., 49: 857-864; Panicali et al., 1982, Proc. Natl. Acad. Sci. USA, 79: 4927-4931).

[0083] Specific initiation signals may also be required for efficient translation of inserted NF-κB pathway-associated coding sequences. These signals include the ATG initiation codon and adjacent sequences. In cases where an entire NF-κB pathway-associated gene, including its own initiation codon and adjacent sequences, is inserted into the appropriate expression vector, no additional translational control signals may be needed. However, in cases where only a portion of the coding sequence is inserted, exogenous translational control signals, including the ATG initiation codon, are preferably provided. Furthermore, the initiation codon is preferably in phase with the reading frame of the coding sequence to ensure translation of the entire insert. These exogenous translational control signals and initiation codons can be of a variety of origins, both natural and synthetic. The efficiency of expression can be enhanced by the inclusion of appropriate transcription enhancer elements, transcription terminators, etc. (see, e.g., Bittner et al., 1987, Methods in Enzymol., 153:516-544).

[0084] In addition, a host cell strain can be chosen which modulates the expression of the inserted sequences, or modifies and processes the gene product in the specific fashion desired. Such modifications (e.g., glycosylation) and processing (e.g., cleavage) of protein products can frequently be important for the function of the protein. Different host cells have characteristic and specific mechanisms for the post-translational processing and modification of proteins. Appropriate cells lines or host systems can be chosen to ensure the correct modification and processing of the foreign protein expressed. To this end, eukaryotic host cells which possess the cellular machinery for proper processing of the primary transcript, glycosylation, and phosphorylation of the gene product can be used. Such mammalian host cells include, but are not limited to, CHO, VERY, BHK, Hela, COS, MDCK, 293, 3T3, WI38, and in particular, breast cancer cell lines such as, for example, BT483, Hs578T, HTB2, BT20 and T47D, and normal mammary gland cell lines such as, for example, CRL7030 and Hs578Bst, and the like.

[0085] For long-term, high-yield production of recombinant proteins, stable expression is preferred. For example, cell lines that stably express the NF-κB pathway-associated polypeptides or peptides are engineered. Thus, rather than using expression vectors which contain viral origins of replication, host cells can be transformed with NF-κB pathway-associated protein encoding nucleic acid molecules, e.g., DNA, controlled by appropriate expression control elements (e.g., promoter, enhancer, sequences, transcription terminators, polyadenylation sites, etc.), and at least one selectable marker. Following the introduction of the foreign DNA, engineered cells are allowed to grow for about 1-2 days in an enriched medium, and then are placed in selective medium. The selectable marker in the recombinant plasmid confers resistance to the selection medium and allows cells to stably integrate the plasmid into their chromosomes and grow to form foci that, in turn, can be cloned and expanded into cell lines. This method can advantageously be used to engineer cell lines that express cellular NF-κB pathway-associated polypeptides or peptides. Such engineered cell lines are particularly useful in screening for NF-κB pathway-associated protein analogs or ligands, or for determining compounds, molecules, and the like, which modulate NF-κB pathway-associated protein expression or function.

[0086] In instances in which the mammalian cell is a human cell, human artificial chromosome (HAC) systems are among the expression systems by which NF-κB pathway-associated nucleic acid sequences can be expressed (see, e.g., Harrington et al., 1997, Nature Genetics, 15: 345-355).

[0087] Host cells which contain the NF-κB pathway-associated protein coding sequences and which preferably express a biologically active gene product can be identified by at least four general approaches: (a) DNA-DNA or DNA-RNA hybridization; (b) the presence or absence of “marker” gene functions; (c) assessing the level of transcription as measured by the expression of NF-κB pathway-associated protein mRNA transcripts in the host cell; and (d) detection of the gene product as measured by immunoassay or by its biological activity.

[0088] In the first approach, the presence of the NF-κB pathway-associated protein coding sequences inserted into the expression vector can be detected by DNA-DNA or DNA-RNA hybridization using probes comprising nucleotide sequences that are homologous to the coding sequences, respectively, or portions or derivatives thereof.

[0089] In the second approach, the recombinant expression vector/host system can be identified and selected based upon the presence or absence of certain “marker” gene functions. For example, if the NF-κB pathway-associated coding sequences are inserted within a marker gene sequence of the vector, recombinants containing the coding sequence can be identified by the absence of the marker gene function. Alternatively, a marker gene can be placed in tandem with the NF-κB pathway-associated protein sequence under the control of the same or a different promoter used to control the expression of the coding sequence. Expression of the marker in response to induction or selection indicates expression of the NF-κB pathway-associated coding sequence.

[0090] Selectable markers include, for example, resistance to antibiotics, resistance to methotrexate, transformation phenotype, and occlusion body formation in baculovirus. In addition, thymidine kinase activity (M. Wigler et al., 1977, Cell, 11: 223) hypoxanthine-guanine phosphoribosyltransferase (Szybalska & Szybalski, 1962, Proc. Natl. Acad. Sci. USA, 48: 2026), and adenine phosphoribosyltransferase (Lowy et al., 1980, Cell, 22: 817) genes can be employed in tk⁻, hgprt⁻ or aprt⁻ cells, respectively. Also, anti-metabolite resistance can be used as the basis of selection for dhfr, which confers resistance to methotrexate (M. Wigler et al., 1980, Proc. Natl. Acad. Sci. USA, 77: 3567; O'Hare et al., 1981, Proc. Natl. Acad. Sci. USA, 78: 1527); gpt, which confers resistance to mycophenolic acid (Mulligan & Berg, 1981, Proc. Natl. Acad. Sci. USA, 78: 2072); neo, which confers resistance to the aminoglycoside G-418 (Colberre-Garapin, et al., 1981, J. Mol. Biol., 150: 1); and hygro, which confers resistance to hygromycin (Santerre et al., 1984, Gene, 30: 147). Additional selectable genes have been described, namely trpB, which allows cells to utilize indole in place of tryptophan; hisD, which allows cells to utilize histinol in place of histidine (Hartman & Mulligan, 1988, Proc. Natl. Acad. Sci. USA, 85: 8047); and ODC (ornithine decarboxylase) which confers resistance to the ornithine decarboxylase inhibitor, 2-(difluoromethyl)-DL-ornithine, DFMO (McConlogue, 1987, in Current Communications in Molecular Biology, Cold Spring Harbor Laboratory ed.).

[0091] In the third approach, transcriptional activity for the NF-κB pathway-associated protein coding region can be assessed by hybridization assays. For example, RNA can be isolated and analyzed by Northern blot using a probe homologous to the NF-κB pathway-associated protein coding sequence or particular portions thereof Alternatively, total nucleic acids of the host cell can be extracted and assayed for hybridization to such probes.

[0092] In the fourth approach, the expression of the NF-κB pathway-associated proteins or peptide products can be assessed immunologically, for example by Western blots, immunoassays such as radio-immunoprecipitation, enzyme-linked immunoassays and the like. The ultimate test of the success of the expression system, however, involves the detection of biologically active NF-κB pathway-associated gene products. A number of assays can be used to detect NF-κB pathway-associated activity, including but not limited to, binding assays and biological assays for NF-κB pathway-associated activity.

[0093] Once a cell clone that produces high levels of a biologically active NF-κB pathway-associated polypeptide is identified, the cloned cells can be expanded and used to produce large amounts of the polypeptide which can be purified using techniques well known in the art, including but not limited to, immunoaffinity purification using antibodies, immunoprecipitation, or chromatographic methods including high performance liquid chromatography (HPLC).

[0094] Cell lines expressing NF-κB pathway-associated proteins are also useful in a method of screening for a compound that is capable of modulating the biological activity of NF-κB pathway-associated polypeptides, comprising the steps of: (a) determining the biological activity of the polypeptide in the absence of a modulator compound; (b) contacting a host cell expressing the polypeptide with the modulator compound; and (c) determining the biological activity of the polypeptide in the presence of the modulator compound; wherein a difference between the activity of the polypeptide in the presence of the modulator compound and in the absence of the modulator compound indicates a modulating effect of the compound. Additional uses for such cell lines expressing NF-κB pathway-associated proteins are described herein or otherwise known in the art.

[0095] Methods that are well known to those skilled in the art are used to construct expression vectors containing the NF-κB pathway-associated protein or peptide coding sequences and appropriate transcriptional and translational control elements and/or signals. These methods include in vitro recombinant DNA techniques, synthetic techniques and in vivo recombination/genetic recombination. See, for example, the techniques described in Maniatis et al., 1989, Molecular Cloning, A Laboratory Manual, Cold Spring Harbor Laboratory, N.Y. and Ausubel et al., 1989, Current Protocols in Molecular Biology, Greene Publishing Associates and Wiley Interscience, N.Y. See also, Sambrook et al., 1989, Molecular Cloning, A Laboratory Manual, Cold Spring Harbor Press, N.Y.

[0096] Modulation of NF-κB Pathway-Associated Polypeptides: Methods, Compounds and Compositions Related Thereto

[0097] In another embodiment, modulators of NF-κB pathway-associated proteins are particularly embraced by the present invention. Modulators can include any molecule, e.g., protein, peptide, oligopeptide, small organic molecule, chemical compound, polysaccharide, polynucleotide, etc., having the capability to directly or indirectly alter or modify the activity or function of the NF-κB pathway-associated polypeptide. In a specific embodiment, this invention encompasses modulators of the proteins identified in Tables 1-6. Candidate modulatory agents or compounds or materials can encompass numerous chemical classes, though typically they are organic molecules, preferably small organic compounds, for example, without limitation, those having a molecular weight of more than 100 and less than about 10,000 daltons, preferably, less than about 2000 to 5000 daltons. Candidate modulatory compounds can comprise functional groups necessary for structural interaction with proteins, particularly hydrogen bonding, and typically include at least an amine, carbonyl, hydroxyl or carboxyl group, preferably at least two of the functional chemical groups. The candidate compounds often comprise cyclical carbon or heterocyclic structures and/or aromatic or polyaromatic structures substituted with one or more of the above functional groups. Candidate compounds are also found among biomolecules including peptides, saccharides, fatty acids, steroids, purines, pyrimidines, derivatives, structural analogs or combinations thereof.

[0098] Modulatory agents or compounds can be obtained from a wide variety of sources including libraries of synthetic or natural compounds. For example, numerous means are available for random and directed synthesis of a wide variety of organic compounds and biomolecules, including expression of randomized oligonucleotides. Alternatively, libraries of natural compounds in the form of bacterial, fingal, plant and animal extracts are available or readily produced. In addition, natural or synthetically produced libraries and compounds are readily modified through conventional chemical, physical and biochemical means. Known pharmacological agents can also be subjected to directed or random chemical modifications, such as acylation, alkylation, esterification, amidification to produce structural analogs.

[0099] Modulators of the NF-κB pathway-associated proteins as embraced by this invention can be antagonists, suppressors, inhibitors, or blockers of the proteins, as such modulators can be efficacious in affecting NF-κB-mediated events or reducing the symptoms underlying NF-κB-related disorders. An antagonist is typically a molecule which, when bound to, or associated with, a NF-κB pathway-associated polypeptide, or a functional fragment thereof, decreases or inhibits the amount or duration of the biological or immunological activity of the polypeptide. Antagonists can include proteins, nucleic acids, carbohydrates, antibodies, or any other molecules that decrease or reduce the effect of a NF-κB pathway-associated polypeptide. Antagonists typically, diminish, inhibit, block, decrease, reduce, suppress, or abolish the function or activity of an NF-κB pathway-associated molecule. More specifically, modulators of NF-κB pathway-associated proteins can be efficacious in treating, ameliorating, or preventing NF-κB-related conditions or disease including, but not limited to, those disclosed herein.

[0100] In addition, modulators such as agonists or enhancers of NF-κB pathway-associated protein function or activity are embraced by the present invention, particularly, for a NF-κB pathway-associated protein target that is part of a reparative, reversing, and/or protective mechanism, which is induced following the exposure of cells to harmful or deleterious extracellular signals. Agonists typically are molecules which, when bound to, or associated with, a NF-κB pathway-associated polypeptide, or a functional fragment thereof, increase, enhance, or prolong the duration of the effect of the NF-κB pathway-associated polypeptide. Agonists may include proteins, peptides, nucleic acids, carbohydrates, or any other molecules that bind to and modulate the effect of the NF-κB pathway-associated polypeptide. Agonists typically enhance, increase, or augment the function or activity of an NF-κB pathway-associated molecule. As such, an agonist compound may be efficacious in enhancing the protective mechanism of a NF-κB pathway-associated protein in alleviating the symptoms of NF-κB-related diseases.

### Screening Assays for Determining Compounds that Modulate NF-κB Pathway-Associated Polypeptides, the NF-κB pathway, and Components Thereof and Compositions Related Thereto

[0101] Screening assays can be used to identify compounds that modulate NF-κB pathway-associated polypeptide function or activity, the NF-κB pathway, or components thereof. Such compounds can include, but are not limited to, peptides, small organic or inorganic molecules or macromolecules such as nucleic acid molecules or proteins, e.g., antibodies and antibody fragments, and can be utilized, for example, in the control and/or treatment of NF-κB related disorders, in the modulation of second messenger or cellular molecules which are regulated or modulated by NF-κB pathway-associated polypeptides and which affect the NF-κB pathway and its related conditions and disorders. These compounds may also be useful, e.g., in elaborating the biological functions of the NF-κB pathway-associated gene products, i.e., the NF-κB pathway-associated proteins and their peptides, in modulating the proteins biological functions and for preventing, treating, reducing, and/or ameliorating symptoms and/or physiological characteristics and effects of NF-κB pathway-related disorders.

[0102] The compositions of the invention include pharmaceutical compositions comprising one or more of the NF-κB pathway-associated polypeptide modulator compounds. Such pharmaceutical compositions can be formulated as discussed hereinbelow. More specifically, these compounds can include compounds that bind to NF-κB pathway-associated polypeptides and peptide components, compounds that bind to other proteins or molecules that interact with the NF-κB pathway-associated gene products and/or interfere with the interaction of the NF-κB pathway-associated gene products with other proteins or molecules, and compounds that modulate the activity of the genes, i.e., modulate the level of NF-κB pathway-associated polypeptide gene expression and/or modulate the level of the gene product or protein activity.

[0103] In a related aspect, assays can be utilized that identify compounds that bind to gene regulatory sequences, e.g., promoter sequences (see e.g., K. A. Platt, 1994, J. Biol. Chem., 269:28558-28562); such compounds may modulate the level of NF-κB pathway-associated polypeptide gene expression. In addition, functional assays can be used to screen for compounds that modulate NF-κB pathway-associated gene product activity. In such assays, compounds are screened for agonistic or antagonistic activity with respect to the biological activity or function of the NF-κB pathway-associated proteins, polypeptides, or peptides, such as changes in the intracellular levels or activity of a molecule with which the NF-κB pathway-associated polypeptide interacts or which is regulated by the NF-κB pathway-associated polypeptide, changes in regulatory factor release, or other activities or functions of the NF-κB pathway-associated protein, polypeptide or peptides which are involved in causing or maintaining NF-κB pathway-related disorders according to this invention.

[0104] According to an embodiment of this invention, molecules that are affected, regulated, modulated, or that otherwise interact with NF-κB pathway-associated polypeptides, for example, molecules of the NF-κB pathway, can be monitored or assayed in polypeptide-expressing host cells to determine if modulators of the polypeptides (e.g., antagonists such as antisense of the polypeptide as described further herein) affect the function of component molecules in the pathway. In a particular aspect of this embodiment, antisense molecules to NF-κB pathway-associated sequences were used to evaluate the outcome of NF-κB-mediated gene expression (Example 5).

[0105] The ability of NF-κB pathway-associated polypeptides to regulate NF-κB functions in NF-κB pathway-associated polypeptide expressing cells supports the view that antagonist and agonists to the NF-κB pathway-associated polypeptides would have an impact on many diseases, including autoimmune diseases, inflammation, asthma, COPD, rheumatoid arthritis (RA), cancers, such as, but not limited to, lung cancer, stomach cancer, breast cancer, testicular cancer, ovarian cancer, cervical cancer, genitourinary tract cancer, bladder cancer, prostate cancer, gastrointestinal cancer, colon cancer, esophageal cancer, head and neck cancer, cancer of the brain, thyroid cancer, liver cancer, pancreatic cancer, kidney cancer, etc., ischemia-reperfusion injury, atherosclerosis, thrombosis, other vascular diseases and HIV.

[0106] According to another embodiment of this invention, screening assays can be designed to identify compounds capable of binding to the NF-κB pathway-associated gene product or peptides thereof. Such compounds can be useful, e.g., in modulating the activity of wild type and/or mutant gene products, in elaborating the biological function of the gene product, and in screens for identifying compounds that disrupt normal gene product interactions. Alternatively, such compounds may in themselves disrupt such interactions.

[0107] Screening assays to identify compounds that bind to NF-κB pathway-associated polypeptides, and/or their composite peptides can involve preparing a reaction mixture of the polypeptide or peptide and a test compound under conditions and for a time sufficient to allow the two components to interact with, i.e., bind to each other, and thus form a complex, which can represent a transient complex that can be removed and/or detected in the reaction mixture. For example, one type of assay involves anchoring a NF-κB pathway-associated polypeptide or peptide, or the test substance, onto a solid phase and detecting the polypeptide or peptide/test compound complexes anchored on the solid phase at the end of the reaction. In one aspect of such a method, the NF-κB pathway-associated polypeptide or peptide can be anchored onto a solid surface, and the test compound, which is not anchored, can be labeled, either directly or indirectly.

[0108] The detection of complexes anchored on the solid surface can be accomplished in a number of ways. In cases in which the previously non-immobilized component is pre-labeled, the detection of label immobilized on the surface indicates that complexes were formed. In cases in which the previously non-immobilized component is not pre-labeled, an indirect label can be used to detect complexes anchored on the surface; e.g., using a labeled antibody specific for the previously non-immobilized component (the antibody, in turn, can be directly labeled, or indirectly labeled with a labeled anti-Ig antibody).

[0109] Alternatively, a reaction can be conducted in a liquid phase, the reaction products separated from unreacted components, and complexes detected, e.g., using an immobilized antibody specific for the NF-κB pathway-associated polypeptide or peptide, or the test compound, to anchor any complexes formed in solution, and a labeled antibody specific for the other component of the formed complex to detect anchored complexes.

[0110] Compounds that modulate NF-κB pathway-associated protein activity can also include compounds that bind to proteins that interact with NF-κB pathway-associated polypeptides. These modulatory compounds can be identified by first identifying those proteins, e.g., cellular proteins, that interact with the NF-κB pathway-associated protein products, e.g., by standard techniques known in the art for detecting protein-protein interactions, such as co-immunoprecipitation, cross-linking and co-purification through gradients or chromatographic columns. Utilizing procedures such as these allows for the isolation of proteins that interact with the NF-κB pathway-associated polypeptides, peptides, or proteins.

[0111] Once isolated, such a protein can be identified and can, in turn, be used, in conjunction with standard techniques, to identify additional proteins with which that protein (and/or the NF-κB pathway-associated protein) interacts. For example, at least a portion of the amino acid sequence of the protein that interacts with a NF-κB pathway-associated gene product can be ascertained using techniques well known to those of skill in the art, such as via the Edman degradation technique (see, e.g., Creighton, 1983, Proteins: Structures and Molecular Principles, W.H. Freeman & Co., N.Y., pp.34-49). The amino acid sequence thus obtained can be used as a guide for the generation of oligonucleotide mixtures that can, in turn, be used to screen for gene sequences encoding the interacting proteins. Screening is accomplished, for example, by standard hybridization or PCR techniques. Techniques for the generation of oligonucleotide mixtures and screening are well-known and practiced in the art (see, e.g., F. M. Ausubel, supra, and PCR Protocols: A Guide to Methods and Applications, 1990, M. Innis et al., eds. Academic Press, Inc., New York).

[0112] In addition, methods can be employed that result in the simultaneous identification of genes which encode proteins that interact with the NF-κB pathway-associated polypeptides. These methods include, for example, probing expression libraries with labeled NF-κB pathway-associated polypeptide, using the polypeptide in a manner similar to the well-known technique of antibody probing of λgt11 libraries. One method that detects protein interactions in vivo is the two-hybrid system. A version of this system is described by Chien et al., 1991, Proc. Natl. Acad. Sci. USA, 88:9578-9582 and is commercially available from Clontech (Palo Alto, Calif.).

[0113] Compounds that disrupt the interaction of NF-κB pathway-associated polypeptides with other molecules, or binding partners, as determined by techniques exemplified above, can be useful in regulating the activity of the polypeptides, including mutant polypeptides. Such compounds can include, but are not limited to, molecules such as peptides, and the like, which bind to NF-κB pathway-associated polypeptides as described above. Illustrative assay systems used to identify compounds that interfere with the interaction between NF-κB pathway-associated polypeptides and their interacting molecule(s) involve preparing a reaction mixture containing a NF-κB pathway-associated polypeptide or peptide and the interacting molecule, under conditions and for a time sufficient to allow the two to interact (and bind), thus forming a complex. In order to test a compound for inhibitory activity, the reaction mixture is prepared in the presence and absence of the test compound. The test compound can be initially included in the reaction mixture, or it can be added at a time subsequent to the addition of the NF-κB pathway-associated polypeptide and its interacting molecule. Control reaction mixtures are incubated without the test compound or with a placebo. Complexes formed between the NF-κB pathway-associated polypeptides and the interacting molecule(s) are then detected. The formation of a complex in the control reaction, but not in the reaction mixture containing the test compound, indicates that the compound interferes with the interaction of the polypeptide and the interacting molecule. Further, complex formation within reaction mixtures containing the test compound and a normal NF-κB pathway-associated protein or peptide product can also be compared with complex formation within reaction mixtures containing the test compound and a mutant NF-κB pathway-associated protein or peptide product. This comparison could be particularly useful in those cases in which it is desirable to identify compounds that disrupt interactions of mutant but not normal NF-κB pathway-associated proteins.

[0114] Assaying for compounds that interfere with the interaction of the NF-κB pathway-associated proteins or peptides and interacting (e.g., modulated or regulated) molecules can be conducted in a heterogeneous or homogeneous format. Heterogeneous assays involve anchoring either the NF-κB pathway-associated polypeptide or the binding molecule onto a solid phase and detecting complexes anchored on the solid phase at the end of the reaction. In homogeneous assays, the entire reaction is carried out in a liquid phase. In either approach, the order of addition of the reaction components can be varied to obtain different information about the compounds being tested. For example, test compounds that interfere with the interaction between the NF-κB pathway-associated polypeptide and its interacting molecules, e.g., by competition, can be identified by conducting the reaction in the presence of the test substance; i.e., by adding the test substance to the reaction mixture prior to, or simultaneously with, the polypeptide and the interacting molecule. Alternatively, test compounds that disrupt preformed complexes, e.g., compounds with higher binding constants that displace one of the components from the complex, can be tested by adding the test compound to the reaction mixture after the complexes between NF-κB pathway-associated protein and another molecule or molecules have been formed. The various formats are described briefly below.

[0115] In a heterogeneous assay system, either the NF-κB pathway-associated polypeptide or the interacting molecule, is anchored onto a solid surface, while the non-anchored molecule is labeled, either directly or indirectly. In practice, microtiter plates are conveniently utilized. The anchored species can be immobilized by non-covalent or covalent attachments. Non-covalent attachment can be achieved simply by coating the solid surface with a solution comprising the polypeptide or the interacting molecule and drying the surface. Alternatively, an immobilized antibody specific for the molecule to be anchored can be used to anchor the species to the solid surface. The surfaces can be prepared in advance and stored.

[0116] In order to conduct the assay, the partner of the immobilized species is exposed to the coated surface with or without the test compound. After the reaction is complete, unreacted components are removed (e.g., by washing) and any complexes formed remain immobilized on the solid surface. The detection of complexes anchored on the solid surface is performed in a number of ways. Where the non-immobilized species is pre-labeled, the detection of label immobilized on the surface indicates that complexes were formed. Where the non-immobilized species is not pre-labeled, an indirect label can be used to detect complexes anchored on the surface; e.g., using a labeled antibody specific for the initially non-immobilized species (the antibody, in turn, can be directly labeled or indirectly labeled with a labeled anti-Ig antibody). Depending upon the order of adding the reaction components, test compounds which inhibit complex formation, or which disrupt preformed complexes, can be detected.

[0117] Alternatively, the reaction can be conducted in a liquid phase in the presence or absence of the test compound, the reaction products separated from unreacted components, and complexes detected; e.g., using an immobilized antibody specific for one of the interacting components, to anchor any complexes formed in solution, and a labeled antibody specific for the other partner to detect anchored complexes. Again, depending upon the order of addition of reaction components to the liquid phase, test compounds that inhibit complex formation or that disrupt preformed complexes can be identified.

[0118] In another aspect of such assays, a preformed complex of the NF-κB pathway-associated polypeptide or peptide and an interacting molecule is prepared in which either the polypeptide or its interacting partner molecule is labeled. However, the signal generated by the label is quenched due to complex formation between the polypeptide and the interacting molecule (see, e.g., U.S. Pat. No. 4,109,496 to Rubenstein which utilizes this approach for immunoassays). The addition of a test substance that competes with and displaces one of the species from the preformed complex will result in the generation of a signal above background. In this way, test substances that disrupt NF-κB pathway-associated protein/interacting partner interactions can be identified.

[0119] Techniques as described above can be employed using the NF-κB pathway-associated peptide fragments that correspond to the binding domains of the NF-κB pathway-associated protein and/or the interacting partner, instead of one or both of the full-length proteins. Any number of methods routinely practiced in the art can be used to identify and isolate the binding sites. These methods include, but are not limited to, mutagenesis of the gene encoding one of the proteins and screening for disruption of binding in a co-immunoprecipitation assay. Compensating mutations in the gene encoding the second species in the complex can then be selected. Sequence analysis of the genes encoding the respective proteins will reveal the mutations that correspond to the region of the protein involved in interacting, e.g., binding. Alternatively, one protein can be anchored to a solid surface using methods as described above, and allowed to interact with, e.g., bind, to its labeled interacting partner, which has been treated with a proteolytic enzyme, such as trypsin. After washing, a short, labeled peptide comprising the interacting, e.g., binding, domain may remain associated with the solid material; the associated domain can be isolated and identified by amino acid sequencing. Also, once the gene coding for the intracellular binding partner is obtained, short gene segments can be engineered to express peptide fragments of the protein, which can then be tested for binding activity and purified or synthesized.

[0120] The human NF-κB pathway-associated polypeptides and/or peptides, or immunogenic fragments or oligopeptides thereof, can be used for screening for therapeutic drugs or compounds for NF-κB pathway-related disorders in a variety of drug screening techniques. The fragment employed in such a screening assay can be free in solution, affixed to a solid support, borne on a cell surface, or located intracellularly. The reduction or elimination of activity in the formation of binding complexes between the NF-κB pathway-associated protein and the agent being tested can be measured. Thus, the present invention provides a method for screening or assessing a plurality of compounds for their specific binding affinity with NF-κB pathway-associated polypeptides, or a bindable peptide fragment, involving obtaining or providing or testing a plurality of compounds, combining the NF-κB pathway-associated polypeptides, or a bindable peptide fragments, with each of the plurality of compounds for a time sufficient to allow binding under suitable conditions and detecting binding of the NF-κB pathway-associated polypeptides or peptides to each of the plurality of test compounds, thereby identifying the compounds that specifically bind to the NF-κB pathway-associated polypeptides or peptides.

[0121] Methods of identifying compounds that modulate the activity of the NF-κB pathway-associated polypeptides and/or peptides comprise combining a potential or candidate compound or drug modulator with an NF-κB pathway-associated polypeptide or peptide, for example, the amino acid sequence encoded by the polynucleotide sequences set forth in Tables 1-6, or peptides encoding sequence thereof, and measuring an effect of the candidate compound or drug modulator on the biological activity of the NF-κB pathway-associated polypeptides or peptides. Such measurable effects include, for example, physical binding interaction; effects on native and cloned polypeptide-expressing cell lines; and effects on components of the NF-κB pathway which are regulated or modulated by the NF-κB pathway-associated polypeptides either directly or indirectly via polypeptide modulators as described herein.

[0122] Another method of identifying compounds that modulate the biological activity of the NF-κB pathway-associated proteins comprises combining a potential or candidate compound or drug modulator, e.g., of an NF-κB pathway component with a host cell that expresses the NF-κB pathway-associated polypeptide and measuring an effect of the candidate compound or drug modulator on the biological activity of the polypeptide. The host cell can also be capable of being induced to express the NF-κB pathway-associated polypeptide, e.g., via inducible expression. Physiological effects of a given candidate modulator on the polypeptide can also be measured. Thus, cellular assays for particular NF-κB pathway modulators can be either direct measurement or quantification of the physical biological activity of the NF-κB pathway-associated polypeptide, or they can involve measurement or quantification of a physiological effect. Such methods preferably employ the NF-κB pathway-associated polypeptides as described herein, or an overexpressed recombinant polypeptide in suitable host cells containing an expression vector as described herein, wherein the NF-κB pathway-associated polypeptide is expressed, overexpressed, or undergoes up-regulated expression.

[0123] Another aspect of the present invention embraces a method of screening for a compound that is capable of modulating the biological activity of the NF-κB pathway-associated polypeptide, comprising providing a host cell containing an expression vector harboring a nucleic acid sequence encoding a NF-κB pathway-associated polypeptide, or a functional peptide or portion of a NF-κB pathway-associated amino acid sequence as set forth in Tables 1-6; determining the biological activity of the expressed NF-κB pathway-associated polypeptides in the absence of a modulator compound; contacting the cell with the modulator compound; and determining the biological activity of the expressed NF-κB pathway-associated polypeptide in the presence of the modulator compound. In such a method, a difference between the activity of the NF-κB pathway-associated polypeptide in the presence of the modulator compound and in the absence of the modulator compound indicates a modulating effect of the compound.

[0124] Essentially any chemical compound can be employed as a potential modulator or ligand in the assays for determining or identifying NF-κB pathway-associated polypeptide modulators or effector molecules. Compounds tested as candidate modulators can be any small chemical compound, or biological entity (e.g., protein, sugar, nucleic acid, lipid). Test compounds are typically small chemical molecules and peptides. Generally, the compounds used as potential modulators can be dissolved in aqueous or organic (e.g., DMSO-based) solutions. The assays are designed to screen large chemical libraries by automating the assay steps and providing compounds from any convenient source. Assays are routinely run in parallel, for example, in microtiter formats on microtiter plates in robotic assays, e.g., high throughput assays. There are many suppliers of chemical compounds, including Sigma (St. Louis, Mo.), Aldrich (St. Louis, Mo.), Sigma-Aldrich (St. Louis, Mo.), Fluka Chemika-Biochemica Analytika (Buchs, Switzerland), for example. Also, compounds may be synthesized by methods known in the art.

[0125] High throughput screening methodologies are especially envisioned for the detection of modulators or effectors of the NF-κB pathway-associated polypeptides particularly for preventing, treating or ameliorating NF-κB pathway-related disorders as discussed herein. Such high throughput screening methods typically involve providing a combinatorial chemical or peptide library containing a large number of potential therapeutic compounds (e.g., ligand or modulator compounds). Such combinatorial chemical libraries or ligand libraries are then screened in one or more assays to identify those library members (e.g., particular chemical species or subclasses) that display a desired characteristic activity. The compounds so identified can serve as conventional lead compounds, or can themselves be used as potential or actual therapeutics.

[0126] As is appreciated by the skilled practitioner, a combinatorial chemical library is a collection of diverse chemical compounds generated either by chemical synthesis or biological synthesis, by combining a number of chemical building blocks (i.e., reagents such as amino acids). As an example, a linear combinatorial library, e.g., a polypeptide or peptide library, is formed by combining a set of chemical building blocks in every possible way for a given compound length (i.e., the number of amino acids in a polypeptide or peptide compound). Millions of chemical compounds can be synthesized through such combinatorial mixing of chemical building blocks.

[0127] The preparation and screening of combinatorial chemical libraries is well known to those having skill in the pertinent art. Combinatorial libraries include, without limitation, peptide libraries (e.g. U.S. Pat. No. 5,010,175; Furka, 1991, Int. J. Pept. Prot. Res., 37:487-493; and Houghton et al., 1991, Nature, 354:84-88). Other chemistries for generating chemical diversity libraries can also be used. Nonlimiting examples of chemical diversity library chemistries include, peptoids (PCT publication no. WO 91/019735), encoded peptides (PCT publication no. WO 93/20242), random bio-oligomers (PCT publication no. WO 92/00091), benzodiazepines (U.S. Pat. No. 5,288,514), diversomers such as hydantoins, benzodiazepines and dipeptides (Hobbs et al., 1993, Proc. Natl. Acad. Sci. USA, 90:6909-6913), vinylogous polypeptides (Hagihara et al., 1992, J. Amer. Chem. Soc., 114:6568), nonpeptidal peptidomimetics with glucose scaffolding (Hirschmann et al., 1992, J. Amer. Chem. Soc., 114:9217-9218), analogous organic synthesis of small compound libraries (Chen et al., 1994, J. Amer. Chem. Soc., 116:2661), oligocarbamates (Cho et al., 1993, Science, 261:1303), and/or peptidyl phosphonates (Campbell et al., 1994, J. Org. Chem., 59:658), nucleic acid libraries (see Ausubel, Berger and Sambrook, all supra), peptide nucleic acid libraries (U.S. Pat. No. 5,539,083), antibody libraries (e.g., Vaughn et al., 1996, Nature Biotechnology, 14(3):309-314) and PCT/US96/10287), carbohydrate libraries (e.g., Liang et al., 1996, Science, 274-1520-1522) and U.S. Pat. No. 5,593,853), small organic molecule libraries (e.g., benzodiazepines, Baum C&EN, Jan. 18, 1993, page 33; and U.S. Pat. No. 5,288,514; isoprenoids, U.S. Pat. No. 5,569,588; thiazolidinones and metathiazanones, U.S. Pat. No. 5,549,974; pyrrolidines, U.S. Pat. Nos. 5,525,735 and 5,519,134; morpholino compounds, U.S. Pat. No. 5,506,337; and the like).

[0128] Devices for the preparation of combinatorial libraries are commercially available (e.g., 357 MPS, 390 MPS, Advanced Chem Tech, Louisville Ky.; Symphony, Rainin, Woburn, Mass.; 433A Applied Biosystems, Foster City, Calif.; 9050 Plus, Millipore, Bedford, Mass.). In addition, a large number of combinatorial libraries are commercially available (e.g., ComGenex, Princeton, N.J.; Asinex, Moscow, Russia; Tripos, Inc., St. Louis, Mo.; ChemStar, Ltd., Moscow, Russia; 3D Pharmaceuticals, Exton, Pa.; Martek Biosciences, Columbia, Md., and the like).

[0129] Solid phase-based in vitro assays in a high throughput format are encompassed in which the cell or tissue expressing an NF-κB pathway-associated polypeptide or peptide is attached to a solid phase substrate. In such high throughput assays, it is possible to screen up to several thousand different modulators or ligands in a single day. In particular, each well of a microtiter plate can be used to perform a separate assay against a selected potential modulator, or, if concentration or incubation time effects are to be observed, every 5-10 wells can test a single modulator. Thus, a single standard microtiter plate can assay about 96 modulators. If 1536 well plates are used, then a single plate can easily assay from about 100 to about 1500 different compounds. It is possible to assay several different plates per day; thus, for example, assay screens for up to about 6,000-20,000 different compounds are possible using the described integrated systems.

[0130] Also encompassed are screening and small molecule (e.g., drug) detection assays which involve the detection or identification of small molecules that can bind to the NF-κB pathway-associated polypeptides or peptides. Particularly preferred are assays suitable for high throughput screening methodologies. In such binding-based detection, identification, or screening assays, a functional assay is not typically required. All that is needed is a target protein, preferably substantially purified, and a library or panel of compounds (e.g., ligands, drugs, small molecules) or biological entities to be screened or assayed for binding to the protein target. Preferably, most small molecules that bind to the target protein will modulate activity in some manner, due to preferential, higher affinity binding to functional areas or sites on the protein.

[0131] An example of such an assay is the fluorescence based thermal shift assay (3-Dimensional Pharmaceuticals, Inc., 3DP, Exton, Pa.) as described in U.S. Pat. Nos. 6,020,141 and 6,036,920 to Pantoliano et al.; see also, J. Zimmerman, 2000, Gen. Eng. News, 20(8)). The assay allows the detection of small molecules (e.g., drugs, ligands) that bind to expressed, and preferably purified, polypeptides such as NF-κB pathway-associated proteins, based on affmity of binding determinations by analyzing thermal unfolding curves of protein-drug or ligand complexes. The drugs or binding molecules determined by this technique can be further assayed, if desired, by methods, such as those described herein, to determine if the molecules affect or modulate function or activity of the target protein.

[0132] To purify NF-κB pathway-associated polypeptides or peptides for use in measuring or quantifying a biological binding or ligand binding activity, the source may be a whole cell lysate that can be prepared by successive freeze-thaw cycles (e.g., one to three) in the presence of standard protease inhibitors. The NF-κB pathway-associated polypeptides can be partially or completely purified by standard protein purification methods, e.g., affinity chromatography using specific antibody as described, or by ligands specific for an epitope tag engineered into a recombinant polypeptide molecule. Binding activity can then be measured as described.

[0133] Compounds that are identified according to the methods provided herein, and that modulate or regulate the biological activity or physiology of the NF-κB pathway-associated polypeptide are embraced as a preferred embodiment of this invention. It is contemplated that such modulatory compounds can be employed in treatment, prevention and therapeutic methods for treating or preventing NF-κB pathway-related disorders or conditions which are mediated by, associated with, regulated or modulated by NF-κB pathway-associated proteins, by administering to an individual in need of such treatment a therapeutically effective amount of the compound identified by the methods described herein. In addition, the present invention provides methods for treating an individual in need of such treatment for NF-κB pathway-related disease, disorder, or condition that is mediated by NF-κB pathway-associated polypeptides, comprising administering to the individual a therapeutically effective amount of the polypeptide-modulating compound identified by a method provided herein.

### Antibodies

[0134] The present invention also includes antibodies directed to the NF-κB pathway-associated polypeptides and peptides, as well as methods for the production of such antibodies, including antibodies that specifically recognize one or more epitopes or epitopes of conserved variants, or peptide fragments of NF-κB pathway-associated proteins. Antibodies can be generated against the NF-κB pathway-associated polypeptides comprising, or alternatively, consisting of, an epitope of the polypeptides having the amino acid sequences encoded by the polynucleotides identified in Tables 1-6. Antibodies refer to intact molecules as well as fragments thereof, such as Fab, F(ab′)₂, Fv, which are capable of binding to an epitopic or antigenic determinant. An antigenic determinant refers to that portion of a molecule that makes contact with a particular antibody (i.e., an epitope). The term “epitope” as used herein, refers to portions of a polypeptide having antigenic or immunogenic activity in an animal, preferably a mammal, and most preferably a human. An “immunogenic epitope” as used herein, refers to a portion of a protein that elicits an antibody response in an animal, as determined by any method known in the art, for example, by the methods for generating antibodies described herein. (See, for example, Geysen et al., 1983, Proc. Natl. Acad. Sci. USA, 81:3998-4002). The term “antigenic epitope” as used herein refers to a portion of a protein to which an antibody can immunospecifically bind to its antigen as determined by any method well known in the art, for example, by the immunoassays described herein. Immunospecific binding excludes non-specific binding, but does not necessarily exclude cross-reactivity with other antigens. Antigenic epitopes need not necessarily be immunogenic. Either the full-length protein or an antigenic peptide fragment can be used. Antibodies are preferably prepared from these regions or from discrete fragments in regions of the NF-κB pathway-associated nucleic acid and protein sequences comprising an epitope.

[0135] Anti-NF-κB pathway-associated protein antibodies can also be prepared from any region of the NF-κB pathway-associated polypeptide or peptides thereof as described herein. Antibodies can be developed against the entire receptor or portions of the receptor, for example, the intracellular carboxy terminal domain, the amino terminal extracellular domain, the entire transmembrane domain, specific transmembrane segments, any of the intracellular or extracellular loops, or any portions of these regions. Antibodies can also be developed against specific functional sites, such as the site of ligand binding, or sites that are glycosylated, phosphorylated, myristylated, or amidated, for example. Also, when inactivation of the protein is desired, a preferred fragment generates the production of an antibody that diminishes or completely prevents ligand binding.

[0136] In the present invention, antigenic epitopes preferably contain a sequence of at least 4, at least 5, at least 6, at least 7, more preferably at least 8, at least 9, at least 10, at least 11, at least 12, at least 13, at least 14, at least 15, at least 20, at least 25, at least 30, at least 40, at least 50, and, most preferably, between about 15 to about 45 amino acids. Preferred polypeptides comprising immunogenic or antigenic epitopes are at least 10, 15, 20, 25, 30, 35, 40, 45, 50, 55, 60, 65, 70, 75, 80, 85, 90, 95, or 100 amino acid residues in length. Additional non-exclusive preferred antigenic epitopes include the antigenic epitopes disclosed herein, as well as portions thereof, as well as any combination of two, three, four, five or more of these antigenic epitopes. Antigenic epitopes are useful, for example, to raise antibodies, including monoclonal antibodies, which specifically bind the epitope. In addition, antigenic epitopes can be used as the target molecules in immunoassays. (See, for instance, Wilson et al., 1984, Cell, 37:767-778; and Sutcliffe et al., 1983, Science, 219:660-666). Such fragments as described herein are not to be construed, however, as encompassing any fragments that may be disclosed prior to the invention.

[0137] When the NF-κB pathway-associated polypeptideor a peptide portion thereof is used to immunize a host animal, numerous regions of the polypeptide may induce the production of antibodies which bind specifically to a given region or three-dimensional structure on the protein; these regions or structures are referred to as antigenic determinants. An antigenic determinant may compete with the intact antigen (i.e., the immunogen used to elicit the immune response) for binding to an antibody. Specific binding or specifically binding refer to the interaction between a protein or peptide, i.e., the NF-κB pathway-associated protein or an NF-κB pathway-associated peptide, and a binding molecule, such as an agonist, an antagonist, or an antibody. The interaction is dependent upon the presence of a particular structure (i.e., an antigenic determinant or epitope) of the protein that is recognized by the binding molecule.

[0138] Similarly, immunogenic epitopes can be used, for example, to induce antibodies according to methods well known in the art. (See, for instance, Sutcliffe et al., supra; Wilson et al., supra ; Chow et al., 1985, Proc. Natl. Acad Sci. USA, 82:910-914; and Bittle et al., 1985, J. Gen. Virol., 66:2347-2354). Preferred immunogenic epitopes include the immunogenic epitopes disclosed herein, as well as any combination of two, three, four, five or more of these immunogenic epitopes.

[0139] The NF-κB pathway-associated polypeptide comprising one or more immunogenic epitopes that elicit an antibody response can be introduced together with a carrier protein, such as albumin, to an animal system (such as rabbit or mouse). Alternatively, if the polypeptide is of sufficient length (e.g., at least about 25 amino acids), the polypeptide can be presented without a carrier. However, immunogenic epitopes comprising as few as 5 to 10 amino acids have been shown to be sufficient to raise antibodies capable of binding to, at the very least, linear epitopes in a denatured polypeptide (e.g., in Western blotting).

[0140] An epitope-bearing NF-κB pathway-associated polypeptide or peptide can be used to induce antibodies according to methods well known in the art including, but not limited to, in vivo immunization, in vitro immunization, and phage display methods. See, e.g., Sutcliffe et al., supra; Wilson et al., supra; and Bittle et al., supra). If in vivo immunization is used, animals can be immunized with free peptide; however, the anti-peptide antibody titer may be boosted by coupling the peptide to a macromolecular carrier, such as keyhole limpet hemacyanin (KLH), or tetanus toxoid (TT). For instance, peptides containing cysteine residues can be coupled to a carrier using a linker such as maleimidobenzoyl-N-hydroxysuccinimide ester (MBS), while other peptides may be coupled to carriers using a more general linking agent, such as glutaraldehyde.

[0141] Epitope bearing NF-κB pathway-associated polypeptide or peptides can also be synthesized as multiple antigen peptides (MAPs), first described by J. P. Tam et al., 1995, Biomed. Pept., Proteins, Nucleic Acids, 199, 1(3):123-32; and Calvo, et al., 1993, J. Immunol., 150(4):1403-12), which are hereby incorporated by reference in their entirety herein. MAPs contain multiple copies of a specific peptide attached to a non-immunogenic lysine core. MAP peptides usually contain four or eight copies of the peptide, which are often referred to as MAP4 or MAP8 peptides. By way of non-limiting example, MAPs can be synthesized onto a lysine core matrix attached to a polyethylene glycol-polystyrene (PEG-PS) support. The peptide of interest is synthesized onto the lysine residues using 9-fluorenylmethoxycarbonyl (Fmoc) chemistry. For example, Applied Biosystems (Foster City, Calif.) offers commercially available MAP resins, such as, for example, the Fmoc Resin 4 Branch and the Fmoc Resin 8 Branch that can be used to synthesize MAPs. Cleavage of MAPs from the resin is performed with standard trifloroacetic acid (TFA)-based cocktails known in the art. Purification of MAPs, except for desalting, is not generally necessary. MAP peptides can be used in immunizing vaccines that elicit antibodies that recognize both the MAP and the native protein from which the peptide was derived.

[0142] Epitope-bearing NF-κB pathway-associated polypeptides and peptides thereof can also be incorporated into a coat protein of a virus, which can then be used as an immunogen or a vaccine with which to immunize animals, including humans, in order stimulate the production of anti-epitope antibodies. For example, the V3 loop of the gp120 glycoprotein of the human immunodeficiency virus type 1 (HIV-1) has been engineered to be expressed on the surface of rhinovirus. Immunization with rhinovirus displaying the V3 loop peptide yielded apparently effective mimics of the HIV-1 immunogens (as measured by their ability to be neutralized by anti-HIV-1 antibodies as well as by their ability to elicit the production of antibodies capable of neutralizing HIV-1 in cell culture). This techniques of using engineered viral particles as immunogens is described in more detail in Smith et al., 1997, Behring Inst Mitt Feb, (98):229-39; Smith et al., 1998, J. Virol., 72:651-659; and Zhang et al., 1999, Biol. Chem., 380:365-74), which are hereby incorporated by reference herein in their entireties.

[0143] Epitope bearing NF-κB pathway-associated polypeptides and peptides thereof can be modified, for example, by the addition of amino acids at the amino- and/or carboxy-terminus of the peptide. Such modifications are performed, for example, to alter the conformation of the epitope bearing polypeptides such that the epitope will have a conformation more closely related to the structure of the epitope in the native protein. An example of a modified epitope-bearing polypeptide of the invention is a polypeptide in which one or more cysteine residues have been added to the polypeptide to allow for the formation of a disulfide bond between two cysteines, thus resulting in a stable loop structure of the epitope-bearing polypeptide under non-reducing conditions. Disulfide bonds can form between a cysteine residue added to the polypeptide and a cysteine residue of the naturally-occurring epitope, or between two cysteines which have both been added to the naturally-occurring epitope-bearing polypeptide. In addition, it is possible to modify one or more amino acid residues of the naturally-occurring epitope-bearing polypeptide by substitution with cysteines to promote the formation of disulfide bonded loop structures. Cyclic thioether molecules of synthetic peptides can be routinely generated using techniques known in the art, e.g., as described in PCT publication WO 97/46251, incorporated in its entirety by reference herein. Other modifications of epitope-bearing polypeptides contemplated by this invention include biotinylation.

[0144] For the production of antibodies in vivo, host animals, such as rabbits, rats, mice, sheep, or goats, are immunized with either free or carrier-coupled peptides or MAP peptides, for example, by intraperitoneal and/or intradermal injection. Injection material is typically an emulsion containing about 100 μg of peptide or carrier protein and Freund's adjuvant, or any other adjuvant known for stimulating an immune response. Several booster injections may be needed, for instance, at intervals of about two weeks, to provide a useful titer of anti-peptide antibody that can be detected, for example, by ELISA assay using free peptide adsorbed to a solid surface. The titer of anti-peptide antibodies in serum from an immunized animal can be increased by selection of anti-peptide antibodies, e.g., by adsorption of the peptide onto a solid support and elution of the selected antibodies according to methods well known in the art.

[0145] As one having skill in the art will appreciate, and as discussed above, the NFκB pathway-associated polypeptides and peptides as described herein, which comprise an immunogenic or antigenic epitope, can be fused to other polypeptide sequences. For example, the polypeptides of the present invention can be fused with the constant domain of immunoglobulins (IgA, IgE, IgG, IgD, or IgM), or portions thereof, e.g., CH1, CH2, CH3, or any combination thereof, and portions thereof, or with albumin (including, but not limited to, recombinant human albumin, or fragments or variants thereof (see, e.g., U. S. Pat. No. 5,876,969; EP Patent No. 0 413 622; and U.S. Pat. No. 5,766,883, incorporated by reference in their entirety herein), thereby resulting in chimeric polypeptides. Such fusion proteins may facilitate purification and may increase half-life in vivo. This has been shown for chimeric proteins containing the first two domains of the human CD4-polypeptide and various domains of the constant regions of the heavy or light chains of mammalian immunoglobulins. See, e.g., Traunecker et al., 1988, Nature, 331:84-86).

[0146] Enhanced delivery of an antigen across the epithelial barrier to the immune system has been demonstrated for antigens (e.g., insulin) conjugated to an FcRn binding partner, such as IgG or Fc fragments (see, e.g., PCT publications WO 96/22024 and WO 99/04813). IgG fuision proteins that have a disulfide-linked dimeric structure due to the IgG portion disulfide bonds have also been found to be more efficient in binding and neutralizing other molecules than are monomeric polypeptides, or fragments thereof, alone. See, e.g., Fountoulakis et al., 1995, J. Biochem., 270:3958-3964).

[0147] Nucleic acids encoding epitopes can also be recombined with a gene of interest as an epitope tag (e.g., a hemagglutinin (“HA”) tag or Flag tag) to aid in detection and purification of the expressed polypeptide. For example, a system for the ready purification of non-denatured fusion proteins expressed in human cell lines has been described by Janknecht et al., (1991, Proc. Natl. Acad. Sci. USA, 88:8972-897). In this system, the gene of interest is subcloned into a vaccinia recombination plasmid such that the open reading frame of the gene is translationally fused to an amino-terminal tag having six histidine residues. The tag serves as a matrix binding domain for the fusion protein. Extracts from cells infected with the recombinant vaccinia virus are loaded onto an Ni²⁺ nitriloacetic acid-agarose column and histidine-tagged proteins are selectively eluted with imidazole-containing buffers.

[0148] Additional fusion proteins of the invention can be generated by employing the techniques of gene-shuffling, motif-shuffling, exon-shuffling, and/or codon-shuffling (collectively referred to as “DNA shuffling”). DNA shuffling can be employed to modulate the activities of polypeptides of the invention, such methods can be used to generate polypeptides with altered activity, as well as agonists and antagonists of the polypeptides. See, generally, U.S. Pat. Nos. 5,605,793; 5,811,238; 5,830,721; 5,834,252; and 5,837,458, and Patten et al., 1997, Curr. Opinion Biotechnol., 8:724-33; Harayama, 1998, Trends Biotechnol., 16(2):76-82; Hansson, et al., 1999, J. Mol. Biol., 287:265-76; and Lorenzo and Blasco, 1998, Biotechniques, 24(2):308-313, the contents of each of which are hereby incorporated by reference in its entirety).

[0149] In one aspect, the alteration of a polynucleotide encoding the NF-κB pathway-associated polypeptides or fragments thereof can be achieved by DNA shuffling. DNA shuffling involves the assembly of two or more DNA segments by homologous or site-specific recombination to generate variation in the polynucleotide sequence. Alternatively, the NF-κB pathway-associated polynucleotides, or their encoded polypeptides or peptides, can be altered by being subjected to random mutagenesis by error-prone PCR, random nucleotide insertion, or other methods, prior to recombination. In addition, one or more components, motifs, sections, parts, domains, fragments, etc., of polynucleotides encoding the NF-κB pathway-associated polypeptides can be recombined with one or more components, motifs, sections, parts, domains, fragments, etc. of one or more heterologous molecules.

[0150] A bispecific or bifunctional antibody is an artificial hybrid antibody having two different heavy/light chain pairs and two different binding sites. Bispecific antibodies can be produced by a variety of methods, including fusion of hybridomas or linking of Fab′ fragments. (See, e.g., Songsivilai & Lachmann, 1990, Clin. Exp. Immunol., 79:315-321; Kostelny et al., 1992, J. Immunol., 148:1547 1553). In addition, bispecific antibodies can be formed as “diabodies” (See, Holliger et al., 1993, Proc. Natl. Acad. Sci. USA, 90:6444-6448), or “Janusins” (See, Traunecker et al., 1991, EMBO J., 10:3655-3659 and Traunecker et al., 1992, Int. J. Cancer Suppl. 7:51-52 -127).

[0151] Antibodies of the invention include the various types mentioned herein above, as well as anti-idiotypic (anti-Id) antibodies (including, e.g., anti-Id antibodies to antibodies of the invention), intracellularly made antibodies (i.e., intrabodies), and epitope-binding fragments of any of the above. The immunoglobulin molecules of the invention can be of any type (e.g., IgG, IgE, IgM, IgD, IgA and IgY), class or subclass (e.g., IgG1, IgG2, IgG3, IgG4, IgA1 and IgA2) of immunoglobulin molecule. A preferred immunoglobulin is of the IgG1 isotype. Other preferred antibody isotypes include the IgG2 and the IgG4 isotypes.

[0152] As is appreciated by the skilled practitioner, immunoglobulins can have both a heavy and a light chain. An array of IgG, IgE, IgM, IgD, IgA, and IgY heavy chains can be paired with a light chain of the kappa or lambda types. Most preferably, antibodies of the present invention are human antigen-binding antibodies and antibody fragments and include, but are not limited to, Fab, Fab′ F(ab′) 2, Fd, single-chain Fvs (scFv), single-chain antibodies, disulfide-linked Fvs (sdFv) and fragments comprising either a V_{L} or V_{H} domain. Antigen-binding antibody fragments, including single-chain antibodies, can comprise the variable region(s) alone or in combination with the entirety or a portion of the following: hinge region, and CH1, CH2, and CH3 domains. Also included in connection with the invention are antigen-binding fragments also comprising any combination of variable region(s) with a hinge region, and CH1, CH2, and CH3 domains. The antibodies of the invention can be from any animal origin including birds and mammals. Preferably, the antibodies are of human, murine (e.g., mouse and rat), donkey, sheep, rabbit, goat, guinea pig, camel, horse, or chicken origin. As used herein, “human” antibodies include antibodies having the amino acid sequence of a human immunoglobulin and include antibodies isolated from human immunoglobulin libraries or from animals transgenic for one or more human immunoglobulin and that do not express endogenous immunoglobulins, as described herein and, for example, in U.S. Pat. No. 5,939,598.

[0153] The antibodies of the present invention can be monospecific, bispecific, trispecific, or of greater multispecificity. Multispecific antibodies can be specific for different epitopes of the NF-κB pathway-associated polypeptides, or can be specific for both an NF-κB pathway-associated polypeptide and a heterologous epitope, such as a heterologous polypeptide or solid support material. (See, e.g., PCT publications WO 93/17715; WO 92/08802; WO 91/00360; WO 92/05793; Tutt et al., 1991, J. Immunol., 147:60-69; U.S. Pat. Nos. 4,474,893; 4,714,681; 4,925,648; 5,573,920; 5,601,819; and Kostelny et al., 1992, J. Immunol., 148:1547-1553).

[0154] Antibodies of the present invention can be described or specified in terms of the epitope(s) or portion(s) of the NF-κB pathway-associated polypeptides that are recognized or specifically bound. The epitope(s) or polypeptide portion(s) can be specified, e.g., by N-terminal and C-terminal positions, by size in contiguous amino acid residues, or as presented in the sequences defined herein. Further included in accordance with the present invention are antibodies which bind to polypeptides encoded by polynucleotides which hybridize to the NF-κB pathway-associated polynucleotides shown in Tables 1-6 under stringent, or moderately stringent, hybridization conditions as described herein.

[0155] The antibodies of the invention (including molecules comprising, or alternatively consisting of, antibody fragments or variants thereof) can bind immunospecifically and/or preferentially to a NF-κB pathway-associated polypeptide, an NF-κB pathway-associated polypeptide fragment, or a variant NF-κB pathway-associated protein. By way of non-limiting example, an antibody can be considered to bind to a first antigen preferentially if it binds to the first antigen with a dissociation constant (Kd) that is less than the antibody's Kd for the second antigen. In another non-limiting embodiment, an antibody can be considered to bind to a first antigen preferentially if it binds to the first antigen with an affinity that is at least one order of magnitude less than the antibody's Ka for the second antigen. In another non-limiting example, an antibody can be considered to bind to a first antigen preferentially if it binds to the first antigen with an affinity that is at least two orders of magnitude less than the antibody's Kd for the second antigen.

[0156] In another nonlimiting example, an antibody can be considered to bind to a first antigen preferentially if it binds to the first antigen with an off rate (koff) that is less than the antibody's koff for the second antigen. In a further nonlimiting example, an antibody can be considered to bind to a first antigen preferentially if it binds to the first antigen with an affinity that is at least one order of magnitude less than the antibody's koff for the second antigen. In yet a further nonlimiting example, an antibody can be considered to bind to a first antigen preferentially if it binds to the first antigen with an affinity that is at least two orders of magnitude less than the antibody's koff for the second antigen.

[0157] Antibodies against the NF-κB pathway-associated polypeptides of this invention can also be described or specified in terms of their binding affinity to the NF-κB pathway-associated polypeptides or peptides thereof. Preferred binding affinities include those with a dissociation constant or Kd of less than 5×10⁻² M, 1×10⁻² M, 5×10⁻³ M, 1×10⁻³ M, 5×10⁻⁴ M, or 1×10⁻⁴ M. More preferred binding affinities include those with a dissociation constant or Kd less than 5×10⁻⁵ M, 1×10⁻⁵M, 5×10⁻⁶ M, 1×10⁻⁶ M, 5×10⁻⁷ M, 1×10⁻⁷ M, 5×10⁻⁸ M, or 1×10⁻⁸ M, Even more preferred antibody binding affinities include those with a dissociation constant or Kd of less than 5×10⁻⁹ M, 1×10⁻⁹ M, 5×10⁻¹⁰ M, 1×10⁻¹⁰ M, 5×10⁻¹¹ M, 1×10^{-11 M,} 5×10⁻¹² M, 1×10⁻¹² M, 5×10⁻¹³ M, 1×10⁻¹³ M, 5×10⁻¹⁴ M, 1×10¹⁴ M, 5×10⁻¹⁵ M, or 1×10⁻¹⁵ M.

[0158] More specifically, antibodies of the invention bind to the NF-κB pathway-associated polypeptides, fragments, or variants thereof, with an off rate (koff) of less than or equal to about 5×10⁻² sec⁻¹, 1×10⁻² sec⁻¹,5×10⁻³ sec⁻¹, or 1×10⁻³ sec⁻¹. More preferably, antibodies of the invention bind to the NF-κB pathway-associated polypeptides, fragments, or variants thereof, with an off rate (koff) of less than or equal to about 5×10⁻⁴ sec⁻¹, 1×10⁻⁴ sec⁻¹, 5×10⁻⁵ sec⁻¹, 1×10⁻⁵ sec⁻¹, 5×10⁻⁶ sec⁻¹, 1×10⁻⁶ sec⁻¹, 5×10⁻⁷ sec⁻¹, or 1×10⁻⁷ sec⁻¹. In other aspects, antibodies invention bind to the NF-κB pathway-associated polypeptides, fragments, or variants thereof with an on rate (kon) of greater than or equal to 1×10³ M⁻¹ sec⁻¹, 5×10³ M⁻¹ sec⁻¹, 1×10⁴ M⁻¹ sec⁻¹, or 5×10⁴ M⁻¹ sec⁻¹. More preferably, antibodies of the invention bind to the NF-κB pathway-associated polypeptides, or fragments, or variants thereof with an on rate greater than or equal to 1×10⁵ M⁻¹ sec⁻¹, 5×10⁵ M⁻¹ sec⁻¹, 1×10⁶ M⁻¹ sec⁻, 5×10⁻⁶ M⁻¹ sec⁻¹, or 1×10⁻⁷ M⁻¹ sec⁻¹.

[0159] The present invention also provides antibodies that competitively inhibit the binding of an antibody to an NF-κB pathway-associated polypeptide epitope as determined by any method known in the art for determining competitive binding, for example, the immunoassays as described herein. In preferred embodiments, the antibody competitively inhibits binding to an epitope by at least 95%, at least 90%, at least 85%, at least 80%, at least 75%, at least 70%, at least 60%, or at least 50%.

[0160] As mentioned above, antibodies of the present invention can act as agonists or antagonists of the NF-κB pathway-associated polypeptides. For example, the invention includes antibodies that can disrupt receptor/ligand interactions, or disrupt interactions of cellular molecules affected by NF-κB pathway-associated polypeptides following cell stimulation, either partially or fully. The invention includes both receptor-specific antibodies and ligand-specific antibodies. The invention also includes receptor-specific antibodies that do not prevent ligand binding, but do prevent receptor activation. Receptor activation (i.e., signaling) can be determined by techniques described herein or as otherwise known in the art. For example, receptor activation can be determined by detecting the phosphorylation (e.g., on tyrosine or serine/threonine) of the receptor or its substrate by immunoprecipitation followed by Western blot analysis. In specific embodiments, antibodies are provided that inhibit ligand activity or receptor activity by at least 95%, at least 90%, at least 85%, at least 80%, at least 75%, at least 70%, at least 60%, or at least 50% of the activity in the absence of the antibody.

[0161] In an embodiment of the present invention, antibodies that immunospecifically bind to the NF-κB pathway-associated polypeptides, or to a fragment or variant thereof, comprise a polypeptide having the amino acid sequence of any one of the Ig heavy chains expressed by an NF-κB pathway-associated polypeptide antibody-expressing cell line of the invention, and/or any one of the Ig light chains expressed by an NF-κB pathway-associated polypeptide antibody-expressing cell line of the invention. In another embodiment of the present invention, antibodies that immunospecifically bind to a NF-κB pathway-associated polypeptide, or to a fragment or variant thereof, comprise a polypeptide having the amino acid sequence of any one of the V_{H} domains of a heavy chain expressed by an anti-NF-κB pathway-associated protein antibody-expressing cell line, and/or any one of the V_{L} domains of a light chain expressed by an anti-NF-κB pathway-associated protein antibody-expressing cell line. In preferred embodiments, antibodies of the present invention comprise the amino acid sequence of a V_{H} domain and V_{L} domain expressed by a single anti-NF-κB pathway-associated protein antibody-expressing cell line. In alternative embodiments, antibodies of the present invention comprise the amino acid sequence of a V_{H} domain and a V_{L} domain expressed by two different anti-NF-κB pathway-associated protein antibody-expressing cell lines. Molecules comprising, or alternatively consisting of, antibody fragments or variants of the V_{H} and/or V_{L} domains expressed by an anti-NF-κB pathway-associated protein antibody-expressing cell line that immunospecifically bind to the NF-κB pathway-associated protein are also encompassed by the invention, as are nucleic acid molecules encoding these V_{H} and V_{L} domains, molecules, fragments and/or variants.

[0162] The present invention also provides antibodies that immunospecificially bind to the NF-κB pathway-associated polypeptides, or fragment or variant of the polypeptides, wherein the antibodies comprise, or alternatively consist of, a polypeptide having an amino acid sequence of any one, two, three, or more of the V_{H}CDRs contained in an Ig heavy chain expressed by one or more anti-NF-κB pathway-associated polypeptide antibody expressing cell lines. In particular, the invention provides antibodies that immunospecifically bind to the NF-κB pathway-associated polypeptides, comprising, or alternatively consisting of, a polypeptide having the amino acid sequence of a V_{H} CDR1 contained in an Ig heavy chain expressed by one or more anti-NF-κB pathway-associated polypeptides antibody expressing cell lines. In another embodiment, antibodies that immunospecifically bind to the NF-κB pathway-associated polypeptides, comprise, or alternatively consist of, a polypeptide having the amino acid sequence of a V_{H} CDR2 contained in a heavy chain expressed by one or more anti-NF-κB pathway-associated polypeptide antibody expressing cell lines. In a preferred embodiment, antibodies that immunospecifically bind to the NF-κB pathway-associated proteins, comprise, or alternatively consist of, a polypeptide having the amino acid sequence of a V_{H} CDR3 contained in an Ig heavy chain expressed by one or more anti-NF-κB pathway-associated polypeptide antibody expressing cell lines of the invention. Molecules comprising, or alternatively consisting of, these antibodies, or antibody fragments or variants thereof, that immunospecifically bind to the NF-κB pathway-associated polypeptides or to a protein fragment or variant thereof are also encompassed by the invention, as are nucleic acid molecules encoding these anti-NF-κB pathway-associated polypeptide antibodies, molecules, fragments and/or variants.

[0163] The present invention also provides antibodies that immunospecificially bind to the NF-κB pathway-associated polypeptides, or a fragment or variant of the proteins, wherein the antibodies comprise, or alternatively consist of, a polypeptide having an amino acid sequence of any one, two, three, or more of the V_{L} CDRs contained in an Ig heavy chain expressed by one or more anti-NF-κB pathway-associated polypeptide antibody expressing cell lines of the invention. In particular, the invention provides antibodies that immunospecifically bind to the polypeptides, comprising, or alternatively consisting of, a polypeptide having the amino acid sequence of a V_{L} CDR1 contained in an Ig heavy chain expressed by one or more anti-NF-κB pathway-associated polypeptide antibody-expressing cell lines of the invention. In another embodiment, antibodies that immunospecifically bind to the NF-κB pathway-associated polypeptides, comprise, or alternatively consist of, a polypeptide having the amino acid sequence of a V_{L} CDR2 contained in an Ig heavy chain expressed by one or more anti-NF-κB pathway-associated polypeptide antibody-expressing cell lines of the invention. In a preferred embodiment, antibodies that immunospecifically bind to the NF-κB pathway-associated polypeptide, comprise, or alternatively consist of, a polypeptide having the amino acid sequence of a V_{L} CDR3 contained in an Ig heavy chain expressed by one or more anti-NF-κB pathway-associated polypeptide antibody-expressing cell lines of the invention. Molecules comprising, or alternatively consisting of, these antibodies, or antibody fragments or variants thereof, that immunospecifically bind to the NF-κB pathway-associated polypeptides or to a protein fragment or variant thereof are also encompassed by the invention, as are nucleic acid molecules encoding these anti-NF-κB pathway-associated polypeptide antibodies, molecules, fragments and/or variants.

[0164] The present invention also provides antibodies (including molecules comprising, or alternatively consisting of, antibody fragments or variants) that immunospecifically bind to the NF-κB pathway-associated polypeptides or to an polypeptide fragment or variant, wherein the antibodies comprise, or alternatively consist of, one, two, three, or more V_{H} CDRs, and one, two, three or more V_{L} CDRs, as contained in an Ig heavy chain or light chain expressed by one or more anti-NF-κB pathway-associated polypeptide antibody-expressing cell lines of the invention. In particular, the invention provides antibodies that immunospecifically bind to the NF-κB pathway-associated polypeptides or to a polypeptide fragment or variant, wherein the antibodies comprise, or alternatively consist of, a V_{H} CDR1 and a V_{L} CDR1, a V_{H} CDR1 and a V_{L} CDR2, a V_{H} CDR1 and a V_{L} CDR3, a V_{H} CDR2 and a V_{L} CDR1, VH CDR2 and V_{L} CDR2, a V_{H} CDR2 and a V_{L} CDR3, a V_{H} CDR3 and a V_{H} CDR1, a V_{H} CDR3 and a V_{L} CDR2, a V_{H} CDR3 and a V_{L} CDR3, or any combination thereof, of the V_{H} CDRs and V_{L} CDRs contained in an Ig heavy chain or Ig light chain expressed by one or more anti-NF-κB pathway-associated polypeptide antibody-expressing cell lines of the invention. In a preferred embodiment, one or more of these combinations are from a single anti-NF-κB pathway-associated polypeptide antibody-expressing cell line. Molecules comprising, or alternatively consisting of, fragments or variants of these antibodies that immunospecifically bind to the NF-κB pathway-associated polypeptides are also encompassed by the invention, as are nucleic acid molecules encoding these anti-NF-κB pathway-associated polypeptide antibodies, molecules, fragments or variants.

[0165] Also provided are nucleic acid molecules, generally isolated, encoding an antibody of the invention (including molecules comprising, or alternatively consisting of, antibody fragments or variants thereof). In a specific aspect, a nucleic acid molecule of the invention encodes an antibody (including molecules comprising, or alternatively consisting of, antibody fragments or variants thereof), comprising, or alternatively consisting of, a V_{H} domain having an amino acid sequence of any one of the V_{H} domains of an immunoglobulin heavy chain expressed by an anti-NF-κB pathway-associated polypeptides antibody-expressing cell line of the invention and a V_{L} domain having an amino acid sequence of an immunoglobulin light chain expressed by an anti-NF-κB pathway-associated polypeptide antibody-expressing cell line of the invention. In another aspect, a nucleic acid molecule of the invention encodes an antibody (including molecules comprising, or alternatively consisting of, antibody fragments or variants thereof), comprising, or alternatively consisting of, a V_{H} domain having an amino acid sequence of any one of the V_{H} domains of an immunoglobulin heavy chain expressed by an anti-NF-κB pathway-associated polypeptide antibody-expressing cell line of the invention, or a V_{L} domain having an amino acid sequence of a light chain expressed by an anti-polypeptide antibody-expressing cell line of the invention. The present invention also provides antibodies that comprise, or alternatively consist of, variants (including derivatives) of the antibody molecules (e.g., the V_{H} domains and/or V_{L} domains) described herein, which antibodies immunospecifically bind to the NF-κB pathway-associated polypeptides or to a fragment or a variant thereof.

[0166] Standard techniques known to those of skill in the art can be used to introduce mutations in the nucleotide sequence encoding a molecule of the invention, including, for example, site-directed mutagenesis and PCR-mediated mutagenesis which result in amino acid substitutions. Preferably the molecules are immunoglobulin molecules. Also, preferably, the variants (including derivatives) encode less than 50 amino acid substitutions, less than 40 amino acid substitutions, less than 30 amino acid substitutions, less than 25 amino acid substitutions, less than 20 amino acid substitutions, less than 15 amino acid substitutions, less than 10 amino acid substitutions, less than 5 amino acid substitutions, less than 4 amino acid substitutions, less than 3 amino acid substitutions, or less than 2 amino acid substitutions, relative to the reference V_{H} domain, V_{H} CDR1, V_{H} CDR2, V_{H} CDR3, V_{L} domain, V_{L} CDR1, V_{L} CDR2, or V_{L} CDR3 domain.

[0167] A “conservative amino acid substitution” is one in which the amino acid residue is replaced with an amino acid residue having a side chain with a similar charge. Families of amino acid residues-having side chains with similar charges have been defined in the art. These families include amino acids with basic side chains (e.g., lysine, arginine, histidine), acidic side chains (e.g., aspartic acid, glutamic acid), uncharged polar side chains (e.g., glycine, asparagine, glutamine, serine, threonine, tyrosine, cysteine), nonpolar side chains (e.g., alanine, valine, leucine, isoleucine, proline, phenylalanine, methionine, tryptophan), beta-branched side chains (e.g., threonine, valine, isoleucine) and aromatic side chains (e.g., tyrosine, phenylalanine, tryptophan, histidine).

[0168] Alternatively, mutations can be introduced randomly along all or part of the coding sequence, such as by saturation mutagenesis. The resultant mutants can be screened for biological activity to identify mutants that retain activity. For example, it is possible to introduce mutations only in framework regions or only in CDR regions of an antibody molecule. Introduced mutations can be silent or neutral missense mutations, i.e., have no, or little, effect on an antibody's ability to bind antigen. These types of mutations can be useful to optimize codon usage, or to improve hybridoma antibody production. Alternatively, non-neutral missense mutations can alter an antibody's ability to bind antigen. The location of most silent and neutral missense mutations is likely to be in the framework regions, while the location of most non-neutral missense mutations is likely to be in the CDRs, although this is not an absolute requirement. One of skill in the art is able to design and test mutant molecules with desired properties, such as no alteration in antigen binding activity or alteration in binding activity (e.g., improvements in antigen binding activity or change in antibody specificity). Following mutagenesis, the encoded protein may routinely be expressed and the functional and/or biological activity of the encoded protein can be determined using techniques described herein or by routinely modifying techniques known and practiced in the art.

[0169] In a specific aspect, an antibody of the invention (including a molecule comprising, or alternatively consisting of, an antibody fragment or variant thereof), that immunospecifically binds to the NF-κB pathway-associated polypeptides or to fragments or variants thereof, comprises, or alternatively consists of, an amino acid sequence encoded by a nucleotide sequence that hybridizes to a nucleotide sequence that is complementary to that encoding one of the V_{H} or V_{L} domains expressed by one or more anti-NF-κB pathway-associated protein antibody-expressing cell lines of the invention, preferably under stringent conditions, e.g., hybridization to filter-bound DNA in 6× sodium chloride/sodium citrate (SSC) at about 45° C. followed by one or more washes in 0.2×SSC/0.1% SDS at about 50-65° C., preferably under highly stringent conditions, e.g., hybridization to filter-bound nucleic acid in 6×SSC at about 45° C. followed by one or more washes in 0.1×SSC/0.2% SDS at about 68° C., or under other stringent hybridization conditions which are known to those of skill in the art (see, for example, Ausubel, F. M. et al., eds., 1989, Current Protocols in Molecular Biology, Vol. I, Green Publishing Associates, Inc. and John Wiley & Sons, Inc., New York at pages 6.3.1-6.3.6 and 2.10.3). Nucleic acid molecules encoding these antibodies are also encompassed by the invention.

[0170] It is well known within the art that polypeptides, or fragments or variants thereof, with similar amino acid sequences often have similar structures and many of the same biological activities. Thus, in one aspect, an antibody (including a molecule comprising, or alternatively consisting of, an antibody fragment or variant thereof), that immunospecifically binds to the NF-κB pathway-associated polypeptides, or to peptide fragments or variants, comprises, or alternatively consists of, a V_{H} domain having an amino acid sequence that is at least 35%, at least 40%, at least 45%, at least 50%, at least 55%, at least 60%, at least 65%, at least 70%, at least 75%, at least 80%, at least 85%, at least 90%, at least 95%, or at least 99% identical to the amino acid sequence of a V_{H} domain of a heavy chain expressed by an anti-NF-κB pathway-associated polypeptide antibody-expressing cell line of the invention.

[0171] In another aspect, an antibody (including a molecule comprising, or alternatively consisting of, an antibody fragment or variant thereof), that immunospecifically binds to the NF-κB pathway-associated polypeptide or to fragments or variants, comprises, or alternatively consists of, a V_{L} domain having an amino acid sequence that is at least 35%, at least 40%, at least 45%, at least 50%, at least 55%, at least 60%, at least 65%, at least 70%, at least 75%, at least 80%, at least 85%, at least 90%, at least 95%, or at least 99% identical to the amino acid sequence of a V_{L} domain of a light chain expressed by an anti-NF-κB pathway-associated polypeptide antibody-expressing cell line of the invention.

[0172] In another preferred aspect, an antibody that enhances the activity of the NF-κB pathway-associated polypeptides, or a fragment or variant thereof, comprises, or alternatively consists of, a polypeptide having the amino acid sequence of a V_{L} CDR3 of an antibody of the invention, or a fragment or variant thereof. Nucleic acid molecules encoding these antibodies are also encompassed by the invention.

[0173] In addition, as nonlimiting examples, anti-NF-κB pathway-associated polypeptide antibodies as described herein can be used to purify, detect, and target the polypeptides, including both in vitro and in vivo diagnostic, detection, screening, and/or therapeutic methods. For example, the antibodies can be used in immunoassays for qualitatively and quantitatively measuring levels of the NF-κB pathway-associated polypeptides in biological samples. (See, e.g., Harlow et al., Antibodies: A Laboratory Manual, Cold Spring Harbor Laboratory Press, 2nd Ed. 1988, which is incorporated by reference herein in its entirety). By way of another nonlimiting example, anti-NF-κB pathway-associated polypeptide antibodies can be administered to individuals as a form of passive immunization. Alternatively, antibodies of the present invention can be used for epitope mapping to identify the epitope(s) that are bound by one or more antibodies. Epitopes identified in this way can, in turn, for example, be used as vaccine candidates, i.e., to immunize an individual to elicit antibodies against the naturally-occurring forms of the NF-κB pathway-associated polypeptides.

[0174] As discussed in more detail below, anti-NF-κB pathway-associated polypeptide antibodies can be used either alone or in combination with other compositions. The antibodies can further be recombinantly fused to a heterologous polypeptide at the N- or C-terminus, or chemically conjugated (including covalent and non-covalent conjugations) to polypeptides or other compositions. For example, antibodies of the present invention can be recombinantly fused or conjugated to molecules that are useful as labels in detection assays and to effector molecules such as heterologous polypeptides, drugs, radionuclides, or toxins. See, e.g., PCT publications WO 92/08495; WO 91/14438; WO 89/12624; U.S. Pat. No. 5,314,995 and EP 396, 387.

[0175] The antibodies of the invention further include derivatives that are modified, i.e., by the covalent attachment of any type of molecule to the antibody. For example, without limitation, anti-NF-κB pathway-associated polypeptide antibody derivatives include antibodies that have been modified, e.g., by glycosylation, acetylation, pegylation, phosphorylation, amidation, derivatization by known protecting/blocking groups, proteolytic cleavage, linkage to a cellular ligand or other protein, etc. Any of numerous chemical modifications can be carried out by known techniques, including, but not limited to, specific chemical cleavage, acetylation, formylation, metabolic synthesis of tunicamycin, etc. In addition, the derivative can contain one or more non-classical amino acids.

[0176] Antibodies against the NF-κB pathway-associated polypeptides of the present invention can be generated by any suitable method known in the art. Polyclonal antibodies directed against an antigen or immunogen of interest can be produced by various procedures well known in the art. For example, the NF-κB pathway-associated polypeptides or peptide can be administered to various host animals as elucidated above to induce the production of sera containing polyclonal antibodies specific for the antigen. Various adjuvants may be used to increase the immunological response, depending on the host species; adjuvants include, but are not limited to, Freund's (complete and incomplete), mineral gels such as aluminum hydroxide, surface active substances such as lysolecithin, pluronic polyols, polyanions, peptides, oil emulsions, keyhole limpet hemocyanins, dinitrophenol, and potentially useful human adjuvants such as BCG (bacille Calmette-Guerin) and corynebacterium parvum. Such adjuvants are also well known in the art.

[0177] Monoclonal antibodies can be prepared using a wide variety of techniques known in the art, including the use of hybridoma, recombinant and phage display technologies, or a combination thereof. For example, monoclonal antibodies can be produced using hybridoma techniques as known and practiced in the art and as taught, for example, in Harlow et al., Antibodies: A Laboratory Manual, (Cold Spring Harbor Laboratory Press, 2nd Ed. 1988; Hammerling, et al., In: Monoclonal Antibodies and T-Cell Hybridomas, Elsevier, N.Y., pages 563-681, 1981, the contents of which are incorporated herein by reference in their entireties. The term “monoclonal antibody” as used herein is not limited to antibodies produced through hybridoma technology. The term “monoclonal antibody” refers to an antibody that is derived from a single clone, including any eukaryotic, prokaryotic, or phage clone, and not the method by which it is produced.

[0178] Methods for producing and screening for specific antibodies using hybridoma technology are routine and well known in the art. In a nonlimiting example, mice can be immunized with a NF-κB pathway-associated polypeptide or a peptide thereof, or with a cell expressing the polypeptide or peptide. Once an immune response is detected, e.g., antibodies specific for the antigen are detected in the sera of immunized mice, the spleen is harvested and splenocytes are isolated. The splenocytes are then fused by well known techniques to any suitable myeloma cells, for example cells from cell line SP2/0 or P3X63-AG8.653 available from the ATCC. Hybridomas are selected and cloned by limiting dilution techniques. The hybridoma clones are then assayed by methods known in the art to determine and select those cells that secrete antibodies capable of binding to the NF-κB pathway-associated polypeptide, or to a portion of the polypeptide. Ascites fluid, which generally contains high levels of antibodies, can be generated by immunizing mice with positive hybridoma clones.

[0179] Another well known method for producing both polyclonal and monoclonal human B cell lines is transformation using Epstein Barr Virus (EBV). Protocols for generating EBV-transformed B cell lines are commonly known in the art, such as, for example, the protocol outlined in Chapter 7.22 of Current Protocols in Immunology, Coligan et al., Eds., 1994, John Wiley & Sons, New York, which is hereby incorporated by reference herein in its entirety. The source of B cells for transformation is commonly human peripheral blood, but B cells for transformation can also be obtained from other sources including, but not limited to, lymph node, tonsil, spleen, tumor tissue, and infected tissues. Tissues are generally prepared as single cell suspensions prior to EBV transformation. In addition, T cells that may be present in the B cell samples can be either physically removed or inactivated (e.g., by treatment with cyclosporin A). The removal of T cells is often advantageous, because T cells from individuals who are seropositive for anti-EBV antibodies can suppress B cell immortalization by EBV. In general, a sample containing human B cells is innoculated with EBV and cultured for 3-4 weeks. A typical source of EBV is the culture supernatant of the B95-8 cell line (ATCC; VR-1492). Physical signs of EBV transformation can generally be seen toward the end of the 3-4 week culture period.

[0180] By phase-contrast microscopy, transformed cells appear large, clear and “hairy”; they tend to aggregate in tight clusters of cells. Initially, EBV lines are generally polyclonal. However, over prolonged periods of cell culture, EBV lines can become monoclonal as a result of the selective outgrowth of particular B cell clones. Alternatively, polyclonal EBV transformed lines can be subcloned (e.g., by limiting dilution) or fused with a suitable fusion partner and plated at limiting dilution to obtain monoclonal B cell lines. Suitable fusion partners for EBV transformed cell lines include mouse myeloma cell lines (e.g., SP2/0, X63-Ag8.653), heteromyeloma cell lines (human x mouse ; e.g., SPAM-8, SBC-H20, and CB-F7), and human cell lines (e.g., GM 1500, SKO-007, RPMI 8226, and KR-4). Thus, the present invention also includes a method of generating polyclonal or monoclonal human antibodies against polypeptides of the invention or fragments thereof, comprising EBV-transformation of human B cells.

[0181] Antibody fragments that recognize specific epitopes can be generated by known techniques. For example, Fab and F(ab′)2 fragments of the invention can be produced by proteolytic cleavage of immunoglobulin molecules, using enzymes such as papain (to produce Fab fragments) or pepsin (to produce F (ab′) 2 fragments). F(ab′)2 fragments contain the variable region, the light chain constant region and the CH1 domain of the heavy chain.

[0182] Antibodies encompassed by the present invention can also be generated using various phage display methods known in the art. In phage display methods, functional antibody domains are displayed on the surface of phage particles that carry the polynucleotide sequences encoding them. In a particular embodiment, such phage can be utilized to display antigen-binding domains expressed from a repertoire or combinatorial antibody library (e.g., human or murine). Phage expressing an antigen binding domain that binds to the antigen of interest, i.e., the NF-κB pathway-associated polypeptide or fragment thereof, can be selected or identified with antigen, e.g., using labeled antigen or antigen bound or captured onto a solid surface or bead. Phage used in these methods are typically filamentous phage including fd and M13 binding domains expressed from phage with Fab, Fv or disulfide stabilized Fv antibody domains recombinantly fused to either the phage gene III or gene VIII protein. Examples of phage display methods that can be used to make the antibodies of the present invention include those disclosed in Brinkman et al., 1995, J. Immunol. Methods, 182:41-50; Ames et al., 1995, J. Immunol. Methods, 184:177-186; Kettleborough et al., 1994, Eur. J. Immunol., 24:952-958; Persic et al., 1997, Gene, 187:9-18; Burton et al., 1994, Advances in Immunology, 57:191-280; PCT application No. PCT/GB91/01134; PCT publications WO 90/02809; WO 91/10737; WO 92/01047; WO 92/18619; WO 93/11236; WO 95/15982; WO 95/20401; and U.S. Pat. Nos. 5,698,426; 5,223,409; 5,403,484; 5,580,717; 5,427,908; 5,750,753; 5,821,047; 5,571,698; 5,427,908; 5,516,637; 5,780,225; 5,658,727; 5,733,743 and 5,969,108, each of which is incorporated herein by reference in its entirety.

[0183] As described in the above references, after phage selection, the antibody coding regions from the phage can be isolated and used to generate whole antibodies, including human antibodies, or any other desired antigen binding fragment, and expressed in any desired host, including mammalian cells, insect cells, plant cells, yeast, and bacteria, e.g., as described in detail below.

[0184] Examples of techniques that can be used to produce single-chain Fvs and antibodies include those described in U.S. Pat. Nos. 4,946,778 and 5,258,498; Huston et al., 1991, Methods in Enzymology, 203:46-88; Shu et al., 1993, Proc. Natl. Acad. Sci. USA, 90:7995-7999; and Skerra et al., 1988, Science, 240:1038-1040. For some uses, including the in vivo use of antibodies in humans and in vitro detection assays, it may be preferable to use chimeric, humanized, or human antibodies. A chimeric antibody is a molecule in which different portions of the antibody are derived from different animal species, such as antibodies having a variable region derived from a murine monoclonal antibody and a human immunoglobulin constant region. Methods for producing chimeric antibodies are known in the art. (See, e.g., Morrison, 1985, Science, 229:1202; Oi et al., 1986, BioTechniques, 4:214; Gillies et al., 1989, J. Immunol. Methods, 125:191-202; and U.S. Pat. Nos. 5,807,715; 4,816,567; and 4,816,397, which are incorporated herein by reference in their entirety).

[0185] Humanized antibodies are antibody molecules from non-human species antibody that bind to the desired antigen and have one or more complementarity determining regions (CDRs) from the nonhuman species and framework regions from a human immnunoglobulin molecule. Often, framework residues in the human framework regions are substituted with the corresponding residues from the CDR donor antibody to alter, and preferably to improve, antigen binding. These framework substitutions are identified by methods well known in the art, e.g., by modeling of the interactions of the CDR and framework residues to identify framework residues important for antigen binding, and by sequence comparison to identify unusual framework residues at particular positions. (See, e.g., Queen et al., U.S. Pat. No. 5,585,089; and Riechmann et al., 1988, Nature, 332:323, which are incorporated herein by reference in their entireties). Antibodies can be humanized using a variety of techniques known in the art, including, for example, CDR-grafting (EP 239,400; PCT publication WO 91/09967; U.S. Pat. Nos. 5,225,539; 5,530,101; and 5,585,089); veneering or resurfacing (EP 592,106; EP 519,596; Padlan, 1991, Molecular Immunology, 28(4/5):489-498; Studnicka et al., 1994, Protein Engineering, 7(6):805-814; Roguska et al., 1994, Proc. Natl. Acad. Sci. USA, 91:969-973; and chain shuffling (U.S. Pat. No. 5,565,332).

[0186] Completely human antibodies can be made by a variety of methods known in the art, including the phage display methods described above, using antibody libraries derived from human immunoglobulin sequences. See also, U.S. Pat. Nos. 4,444,887 and 4,716,111; and PCT publications WO 98/46645, WO 98/50433, WO 98/24893, WO 98/16654, WO 96/34096, WO 96/33735, and WO 91/10741; each of which is incorporated herein by reference in its entirety. Completely human antibodies are particularly desirable for therapeutic treatment of human patients, so as to avoid or alleviate immune reaction to foreign protein.

[0187] Human antibodies can also be produced using transgenic mice which are incapable of expressing functional endogenous immunoglobulins, but which can express human immunoglobulin genes. For example, the human heavy and light chain immunoglobulin gene complexes can be introduced randomly, or by homologous recombination, into mouse embryonic stem cells. Alternatively, the human variable region, constant region, and diversity region may be introduced into mouse embryonic stem cells, in addition to the human heavy and light chain genes. The mouse heavy and light chain immunoglobulin genes can be rendered nonfunctional separately or simultaneously with the introduction of human immunoglobulin loci by homologous recombination. In particular, homozygous deletion of the J_{H} region prevents endogenous antibody production. The modified embryonic stem cells are expanded and microinjected into blastocysts to produce chimeric mice. The chimeric mice are then bred to produce homozygous offspring that express human antibodies. The transgenic mice are immunized in the normal fashion with a selected antigen, e.g., all or a portion of a polypeptide of the invention.

[0188] Monoclonal antibodies directed against the antigen can be obtained from the immunized transgenic mice using conventional hybridoma technology. The human immunoglobulin transgenes harbored by the transgenic mice rearrange during B cell differentiation, and subsequently undergo class switching and somatic mutation. Thus, using such a technique, it is possible to produce useful human IgG, IgA, IgM and IgE antibodies. For an overview of the technology for producing human antibodies, see Lonberg and Huszar, 1995, Intl. Rev. Immunol., 13:65-93. For a detailed discussion of the technology for producing human antibodies and human monoclonal antibodies and protocols for producing such antibodies, see, e.g., PCT publications WO 98/24893; WO 92/01047; WO 96/34096; WO 96/33735; European Patent No. 0 598 877; U.S. Pat. Nos. 5,413,923; 5,625,126; 5,633,425; 5,569,825; 5,661,016; 5,545,806; 5,814,318; 5,885,793; 5,916,771; 5,939,598; 6,075,181; and 6,114,598, which are incorporated by reference herein in their entirety. In addition, companies such as Abgenix, Inc. (Fremont, Calif.) and Genpharm (San Jose, Calif.) can be engaged to provide human antibodies directed against a selected antigen using technology similar to the above-described technologies.

[0189] In another aspect, completely human antibodies that recognize a selected epitope can be generated using a technique referred to as “guided selection”. In this approach, a selected non-human monoclonal antibody, e.g., a mouse antibody, is used to guide the selection of a completely human antibody recognizing the same epitope. (Jespers et al., 1988, BioTechnology, 12:899-903).

[0190] Further, antibodies specific for the NF-κB pathway-associated polypeptide can, in turn, be utilized to generate anti-idiotypic antibodies that “mimic” the polypeptide using techniques well known to those skilled in the art. (See, e.g., Greenspan and Bona, 1989, FASEB J., 7(5):437-444 and Nissinoff, 1991, J. Immunol., 147(8):2429-2438). For example, antibodies which bind to and competitively inhibit polypeptide multimerization and/or binding of the NF-κB pathway-associated polypeptide to a ligand can be used to generate anti-idiotypic antibodies that “mimic” the polypeptide multimerization and/or binding domain and, as a consequence, bind to and neutralize the polypeptide and/or its ligand, e.g., in therapeutic regimens. Such neutralizing anti-idiotypes or Fab fragments of such anti-idiotypes can be used to neutralize polypeptide ligand. For example, such anti-idiotypic antibodies can be used to bind the NF-κB pathway-associated polypeptides and/or to bind their ligands/receptors, and thereby activate or block their biological activity.

[0191] In another aspect, intrabodies are embraced. Intrabodies are antibodies, often scFvs, that are expressed from a recombinant nucleic acid molecule and are engineered to be retained intracellularly (e.g., retained in the cytoplasm, endoplasmic reticulum, or periplasm of the host cells). Intrabodies can be used, for example, to ablate the function of a protein to which the intrabody binds. The expression of intrabodies can also be regulated through the use of inducible promoters in the nucleic acid expression vector comprising nucleic acid encoding the intrabody. Intrabodies of the invention can be produced using methods known in the art, such as those disclosed and reviewed in Chen et al., 1994, Hum. Gene Ther., 5:595-601; Marasco, W. A., 1997, Gene Ther., 4:11-15; Rondon and Marasco, 1997, Annu. Rev. Microbiol., 51:257-283; Proba et al., 1998, J. Mol. Biol., 275:245-253; Cohen et al., 1998, Oncogene, 17:2445-2456; Ohage and Steipe, 1999, J. Mol. Biol., 291:1119-1128; Ohage et al., 1999, J. Mol. Biol., 291:1129-1134; Wirtz and Steipe, 1999, Protein Sci., 8:2245-2250; Zhu et al., 1999, J. Immunol. Methods, 231:207-222.

[0192] XenoMouse Technology Antibodies in accordance with the invention are preferably prepared by the utilization of a transgenic mouse that has a substantial portion of the human antibody producing genome inserted, but that is rendered deficient in the production of endogenous murine antibodies (e.g., XenoMouse strains available from Abgenix Inc., Fremont, Calif.). Such mice are capable of producing human immunoglobulin molecules and antibodies and are virtually deficient in the production of murine immunoglobulin molecules and antibodies. Technologies utilized for achieving the same are disclosed in the patents, applications, and references disclosed herein.

[0193] The ability to clone and reconstruct megabase-sized human loci in YACs and to introduce them into the mouse germline provides a powerful approach to elucidating the functional components of very large or crudely mapped loci, as well as generating useful models of human disease. Furthermore, the utilization of such technology for substitution of mouse loci with their human equivalents can provide unique insights into the expression and regulation of human gene products during development, their communication with other systems, and their involvement in disease induction and progression. An important practical application of such a strategy is the “humanization” of the mouse humoral immune system. Introduction of human immunoglobulin (Ig) loci into mice in which the endogenous Ig genes have been inactivated offers the opportunity to study the mechanisms underlying programmed expression and assembly of antibodies, as well as their role in B cell development. Furthermore, such a strategy can provide an ideal source for the production of fully human monoclonal antibodies (Hu MAbs) an important milestone toward fulfilling the promise of antibody therapy in human disease.

[0194] Fully human antibodies are expected to minimize the immunogenic and allergic responses intrinsic to mouse or mouse-derivatized monoclonal antibodies and thus to increase the efficacy and safety of the administered antibodies. The use of fully human antibodies can be expected to provide a substantial advantage in the treatment of chronic and recurring human diseases, such as cancer, which require repeated antibody administrations.

[0195] One approach toward the goal of producing fully human antibodies was to engineer mouse strains deficient in mouse antibody production to harbor large fragments of the human Ig loci in anticipation that such mice would produce a large repertoire of human antibodies in the absence of mouse antibodies. Large human Ig fragments would preserve the large variable gene diversity as well as the proper regulation of antibody production and expression. By exploiting the mouse machinery for antibody diversification and selection and the lack of immunological tolerance to human proteins, the reproduced human antibody repertoire in these mouse strains should yield high affinity antibodies against any antigen of interest, including human antigens. Using the hybridoma technology, antigen-specific human monoclonal antibodies with the desired specificity could be readily produced and selected.

[0196] This general strategy was demonstrated in connection with the generation of the first “XenoMouseT” strains as published in 1994. See Green et al., 1994, Nature Genetics, 7:13-21. The XenoMouse strains were engineered with yeast artificial chromosomes (YACS) containing 245 kb and 10 190 kb-sized germline configuration fragments of the human heavy chain locus and kappa light chain locus, respectively, which contained core variable and constant region sequences. Id. The human Ig containing YACs proved to be compatible with the mouse system for both rearrangement and expression of antibodies and were capable of substituting for the inactivated mouse Ig genes. This was demonstrated by their ability to induce B-cell development, to produce an adult-like human repertoire of fully human antibodies, and to generate antigen-specific human monoclonal antibodies. These results also suggested that introduction of larger portions of the human Ig loci containing greater numbers of V genes, additional regulatory elements, and human Ig constant regions might recapitulate substantially the full repertoire that is characteristic of the human humoral response to infection and immunization. The work of Green et al. was recently extended to the introduction of greater than approximately 80% of the human antibody repertoire through the use of megabase-sized, germline configuration YAC fragments of the human heavy chain loci and kappa light chain loci, respectively, to produce XenoMouse mice. See Mendez et al., 1997, Nature Genetics, 15:146-156; Green and Jakobovits, 1998, J. Exp. Med., 188:483-495; and Green, 1999, Journal of Immunological Methods, 231:11-23, the disclosures of which are hereby incorporated herein by reference.

[0197] Human anti-mouse antibody (HAMA) responses have led the industry to prepare chimeric or otherwise humanized antibodies. While chimeric antibodies typically are comprised of a human constant region and a murine variable region, it is expected that certain human anti-chimeric antibody (HACA) responses will be observed, particularly in treatments involving chronic or multi-dose utilizations of the antibody. Thus, it is desirable to provide fully human antibodies against the NF-κB pathway-associated polypeptides or peptides in order to vitiate concerns and/or effects of HAMA or HACA responses.

[0198] Polypeptide antibodies of the invention can be chemically synthesized or produced through the use of recombinant expression systems. Accordingly, the invention further embraces polynucleotides comprising a nucleotide sequence encoding an antibody of the invention and fragments thereof. The invention also encompasses polynucleotides that hybridize under stringent or lower stringency hybridization conditions, e.g., as defined supra, to polynucleotides that encode an antibody, preferably, an antibody that specifically binds to the NF-κB pathway-associated polypeptides having the amino acid sequences shown in Tables 1-6 (SEQ ID NOS: 2, 4, 6, 8, 10, 12, 14, 16, 18, 20, 22, 24, 26, 28, 30, 32, 34, 36, 38, 40, 42, 44, 46, 48, 50, 52, 54, 56, 58, 60, 62, 64, 66, 68, 70, 72, 74, 76, 78, 80, 82, 84, 86, 88, 90, 92, 94, 96, 98, 100, 102, 104, 106, 108, 110, 112, 114, 116, 118, 120, 122, 124, 126, 128, 130, 132, 134, 136, 138, 140, 142, 144, 146, 148, 150, 152, 154, 156, 158, 160, 162, 164, 166, 168, 170, 172, 174, 176, 178, 180, 182, 184, 186, 188, 190, 192, 194, 196, 198, 200, 202, 204, 206, 208, 210, 212, 214, 216, 218, 220, 222, 224, 226, 228, 230, 232, 234, 236, 238, 240, 242, 244, 246, 248, 250, 252, 254, 256, 258, 260, 262, 264, 266, 268, 270, 272, 274, 276, 278, 280, 282, 284, 286, 288, 290, 292, 294, 296, 298, 300, 302, 304, 306, 308, 310, 312, 314, 316, 318, 320, 322, 324, 326, 328, 330, 332, 334, 336, 338, 340, 342, 344, 346, 348, 350, 352, 354, 356, 358, 360, 362, 364, 366, 368, 370, 372, 374, 376, 378, 380, 382, 384, 386, 388, 390, 392, 394, 396, 398, 400, 402, 404, 406, 408, 410, 412, 414, 416, 418, 420, 422, 424, 426, 428, 430, 432, 434, 436, 438, 440, 442, 445, 447, 449, 451, 453, 455, 457, 460, 462, 464, 466, 468, 470, 472, 474, 476, 478, 480, 482, 484, 486, 488, 490, 492, 494, 496, 498, 500, 502, 504, 506, 508, 510, 512, 514, 516, 518, 520, 522, 524, 526, 528, 531, 534, 536, 538, 540, 542, 544, 546, 548, 550, 552, 554, 556, 558, 560, 562, 564, 566, 568, 570, 572, 574, 576, 578, 580, 582, 584, 586, 588, 590, 592, 594, 596, 598, 600, 602, 604, 606, 608, 610, 613, 615, 617, 619, 621, 623, 625, 627, 629, 631, 633, 635, 637, 640, 642, 644, 646, 648, 650, 652, 654, 656, 658, 660, 662, 664, 666, 668, 670, 672, 674, 676, 750, 752, 754, 756, 758, 760, 762, 764, 766, 768, 770, 772, 774, 776, 778 & 780).

[0199] Polynucleotides can be obtained, and the nucleotide sequence of the polynucleotides determined, by any method known in the art. For example, if the nucleotide sequence of the antibody is known, a polynucleotide encoding the antibody can be assembled from chemically synthesized oligonucleotides (e.g., as described in Kutmeier et al., 1994, BioTechniques, 17:242), which, briefly, involves the synthesis of overlapping oligonucleotides containing portions of the sequence encoding the antibody, the annealing and ligating of those oligonucleotides, and then the amplification of the ligated oligonucleotides by PCR.

[0200] Alternatively, a polynucleotide encoding an antibody can be generated from nucleic acid from a suitable source. If a clone containing a nucleic acid encoding a particular antibody is not available, but the sequence of the antibody molecule is known, a nucleic acid encoding the immunoglobulin can be chemically synthesized or obtained from a suitable source (e.g., an antibody cDNA library, or a cDNA library generated from, (or a nucleic acid, preferably poly A+ RNA, isolated from), any tissue or cells expressing the antibody, such as hybridoma cells selected to express an antibody of the invention by PCR amplification using synthetic primers hybridizable to the 3′ and 5′ ends of the sequence. Alternatively, cloning using an oligonucleotide probe specific for the particular gene sequence to identify, e.g., a cDNA clone from a cDNA library that encodes the antibody can be employed. Amplified nucleic acids generated by PCR can then be cloned into replicable cloning vectors using any method well known in the art.

[0201] Once the nucleotide sequence and corresponding amino acid sequence of the antibody are determined, the nucleotide sequence of the antibody can be manipulated using methods well known in the art for the manipulation of nucleotide sequences, e.g., recombinant DNA techniques, site directed mutagenesis, PCR, etc. (see, for example, the techniques described in Sambrook et al., 1990, Molecular Cloning, A Laboratory Manual, 2nd Ed., Cold Spring Harbor Laboratory, Cold Spring Harbor, N.Y.; and Ausubel et al., eds., 1998, Current Protocols in Molecular Biology, John Wiley & Sons, N.Y., which are both incorporated by reference herein in their entireties), to generate antibodies having a different amino acid sequence, for example, to create amino acid substitutions, deletions, and/or insertions.

[0202] In a specific embodiment, the amino acid sequence of the heavy and/or light chain variable domains can be inspected to identify the sequences of the CDRs by methods that are well known in the art, e.g., by comparison to known amino acid sequences of other heavy and light chain variable regions, to determine the regions of sequence hypervariability. Using routine recombinant DNA techniques, one or more of the CDRs can be inserted within framework regions, e.g., into human framework regions, to humanize a non-human antibody, as described supra. The framework regions can be naturally occurring or consensus framework regions, and preferably, are human framework regions (see, e.g., Chothia et al., 1998, J. Mol. Biol., 278:457-479 for a listing of human framework regions).

[0203] Preferably, the polynucleotide generated by the combination of the framework regions and CDRs encodes an antibody that specifically binds to the NF-κB pathway-associated polypeptides. Also preferably, as discussed supra, one or more amino acid substitutions can be made within the framework regions; such amino acid substitutions are performed with the goal of improving binding of the antibody to its antigen. In addition, such methods can be used to make amino acid substitutions or deletions of one or more variable region cysteine residues participating in an intrachain disulfide bond to generate antibody molecules lacking one or more intrachain disulfide bonds. Other alterations to the polynucleotide are encompassed by the present invention and are within the skill of the art.

[0204] For some uses, such as for in vitro affinity maturation of an anti-NF-κB pathway-associated polypeptide antibody of the invention, it is useful to express the V_{H} and V_{L} domains of the Ig heavy and light chains of one or more antibodies of the invention as single chain antibodies, or Fab fragments, in a phage display library using phage display methods as described supra. For example, the cDNAs encoding the V_{H} and V_{L} domains of one or more antibodies of the invention can be expressed in all possible combinations using a phage display library, thereby allowing for the selection of V_{H}/V_{L} combinations that bind to the NF-κB pathway-associated polypeptides or peptides thereof with preferred binding characteristics such as improved affinity or improved off rates. In addition, V_{H} and V_{L} segments, particularly, the CDR regions of the V_{H} and V_{L} domains of one or more antibodies of the invention, can be mutated in vitro. Expression of V_{H} and V_{L} domains with “mutant” CDRs in a phage display library allows for the selection of V_{H}/V_{L} combinations that bind to the NF-κB pathway-associated polypeptides.

[0205] In phage display methods, functional antibody domains are displayed on the surface of phage particles which carry the polynucleotide sequences encoding them. In particular, DNA sequences encoding the V_{H} and V_{L} domains are amplified from animal cDNA libraries (e.g., human or murine cDNA libraries of lymphoid tissues) or from synthetic cDNA libraries. The DNA encoding the V_{H} and V_{L} domains are joined together by an scFv linker by PCR and cloned into a phagemid vector (e.g., p CANTAB 6 or pComb 3 HSS). The vector is introduced into E. coli via electroporation and the E. coli is infected with helper phage. Phage used in these methods are typically filamentous phage, including fd and M13, and the V_{H} and V_{L} domains are usually recombinantly fused either to the phage gene III or gene VIII. Phage expressing an antigen binding domain that binds to an antigen of interest (i.e., the NF-κB pathway-associated polypeptide or a fragment thereof) can be selected or identified with antigen, e.g., using labeled antigen or antigen bound or captured onto a solid surface or bead.

[0206] Recombinant expression of an anti-NF-κB pathway-associated polypeptide antibody of the invention, or a fragment, derivative, variant, or analog thereof (e.g., a heavy or light chain of an antibody, or a single chain antibody, of the invention) requires construction of an expression vector containing a polynucleotide that encodes the antibody. Once a polynucleotide encoding an anti-NF-κB pathway-associated polypeptide antibody molecule, or a heavy or light chain of an antibody, or portion thereof (preferably containing the heavy or light chain variable domain), of the invention has been obtained, the vector for the production of the antibody molecule can be produced by recombinant DNA technology using techniques well known in the art. Methods for preparing a protein by expressing a polynucleotide encoding an antibody are described herein. Methods that are well known to those skilled in the art can be used to construct expression vectors containing antibody coding sequences and appropriate transcriptional and translational control signals. These methods include, for example, in vitro recombinant DNA techniques, synthetic techniques, and in vivo genetic recombination. The invention, thus embraces replicable vectors comprising a nucleotide sequence encoding an antibody molecule of the invention, or a heavy or light chain thereof, or a heavy or light chain variable domain, operably linked to a promoter. Such vectors can include the nucleotide sequence encoding the constant region of the antibody molecule (see, e.g., PCT publication WO 86/05807; PCT publication WO 89/01036; and U.S. Pat. No. 5,122,464) and the variable domain of the antibody can be cloned into such a vector for expression of the entire heavy or light chain.

[0207] Methods of constructing expression vectors; types of vectors; methods of transferring the expression vectors into host cells and culturing the cells to produce antibodies; use of selection markers and systems; and the like, involve conventional techniques, and have been described above with respect to NF-κB pathway-associated protein expression. Such methods and the like are equally applicable for recombinant immunoglobulin protein expression and the production of anti-NF-κB pathway-associated polypeptide antibodies.

[0208] As one of its aspects, the invention includes host cells containing a polynucleotide encoding an anti-NF-κB pathway-associated polypeptide antibody, or a heavy or light chain thereof, or a single chain antibody of the invention, operably linked to a heterologous promoter. In preferred aspects for the expression of double-chained antibodies, vectors encoding both the heavy and light chains may be co-expressed in the host cell for expression of the entire immunoglobulin molecule, as detailed below.

[0209] The expression levels of an antibody molecule can be increased by vector amplification (for a review, see Bebbington and Hentschel, “The use of vectors based on gene amplification for the expression of cloned genes in mammalian cells in DNA cloning”, Vol. 3. (Academic Press, New York, 1987). When a marker in the vector system expressing an antibody is amplifiable, an increase in the level of inhibitor present in the host cell culture increases the number of copies of the marker gene. Since the amplified region is associated with the antibody gene, production of the antibody will also increase (Crouse et al., 1983, Mol. Cell. Biol., 3:257).

[0210] Vectors which use glutamine synthase (GS) or DHFR as the selectable markers can be amplified in the presence of the drugs methionine sulphoximine or methotrexate, respectively. An advantage of glutamine synthase based vectors is the availability of cell lines (e.g., the murine myeloma cell line, NSO) that are glutamine synthase negative. Glutamine synthase expression systems can also function in glutamine synthase expressing cells (e.g. Chinese Hamster Ovary (CHO) cells) by providing additional inhibitor to prevent the functioning of the endogenous gene.

[0211] Vectors that express glutamine synthase as the selectable marker include, but are not limited to, the pEE6 expression vector described in Stephens and Cockett, 1989, Nucl. Acids. Res., 17:7110. A glutamine synthase expression system and components thereof are detailed in PCT publications: W087/04462; W086/05807; W089/01036; W089/10404; and W091/06657 which are incorporated by reference herein in their entireties. In addition, glutamine synthase expression vectors that can be used in accordance with the present invention are commercially available from suppliers, including, for example, Lonza Biologics, Inc. (Portsmouth, N.H.). The expression and production of monoclonal antibodies using a GS expression system in murine myeloma cells is described in Bebbington et al., 1992, BioTechnology, 10:169 and in Biblia and Robinson, 1995, Biotechnol. Prog., 11:1, which are incorporated by reference herein in their entireties.

[0212] A host cell can be co-transfected with two expression vectors of the invention, the first vector encoding an Ig heavy chain derived polypeptide and the second vector encoding an Ig light chain derived polypeptide. The two vectors can contain identical selectable markers that enable equal expression of heavy and light chain polypeptides. Alternatively, a single vector can be used which encodes, and is capable of expressing, both the Ig heavy and light chain polypeptides. In such situations, the light chain should be placed before the heavy chain to avoid an excess of toxic free heavy chain (Proudfoot, 1986, Nature, 322:52; Kohler, 1980, Proc. Natl. Acad. Sci. USA, 77:2197). The coding sequences for the heavy and light chains can comprise cDNA or genomic DNA.

[0213] Once an antibody molecule against a NF-κB pathway-associated polypeptide of the invention has been produced by an animal, chemically synthesized, or recombinantly expressed, it can be purified by any method known in the art for the purification of an immunoglobulin or polypeptide molecule, for example, by chromatography (e.g., ion exchange, affinity, particularly by affmity for the specific antigen, Protein A, and sizing column chromatography), centrifugation, differential solubility, or by any other standard technique for the purification of proteins. In addition, the antibodies of the present invention or fragments thereof can be fused to heterologous polypeptide sequences described herein or otherwise known in the art, to facilitate purification.

[0214] The present invention encompasses antibodies that are recombinantly fused or chemically conjugated (including both covalently and non-covalently conjugated) to a polypeptide (or portion thereof, preferably at least 10, 20, 30, 40, 50, 60, 70, 80, 90 or 100 amino acids of the polypeptide) of the present invention to generate fusion proteins. The fusion does not necessarily need to be direct, but can occur through linker sequences. The antibodies can be specific for NF-κB pathway-associated polypeptide antigens (or portions thereof, preferably at least 10, 20, 30, 40, 50, 60, 70, 80, 90 or 100 amino acids of the polypeptide). For example, antibodies can be used to target the NF-κB pathway-associated polypeptide to particular cell types, either in vitro or in vivo, by fusing or conjugating NF-κB pathway-associated polypeptide to antibodies specific for particular cell surface receptors.

[0215] NF-κB pathway-associated polypeptides or antibodies raised against the NF-κB pathway-associated polypeptides of the present invention (including fragments or variants thereof) can be fused to either the N-terminal or C-terminal end of a heterologous protein (e.g., immunoglobulin Fc polypeptide or human serum albumin polypeptide). Antibodies of the invention can also be fused to albumin (including, but not limited to, recombinant human serum albumin (see, e.g., U.S. Pat. No. 5,876,969, issued Mar. 2, 1999; EP Patent 0 413 622; and U.S. Pat. No. 5,766,883, issued Jun. 16, 1998, incorporated herein by reference in their entirety), resulting in chimeric polypeptides. In a preferred aspect, polypeptides and/or antibodies of the present invention (including fragments or variants thereof) are fused with the mature form of human serum albumin (i.e., amino acids 1-585 of human serum albumin as shown in FIGS. 1 and 2 of EP Patent 0 322 094, which is herein incorporated by reference in its entirety). In another preferred aspect, polypeptides and/or antibodies of the present invention (including fragments or variants thereof) are fused with polypeptide fragments comprising, or alternatively consisting of, amino acid residues 1-z of human serum albumnin, where z is an integer from 369 to 419, as described in U.S. Pat. No. 5,766,883 incorporated herein by reference in its entirety.

[0216] Polynucleotides encoding NF-κB pathway-associated polypeptide fusion proteins and antibodies thereto are also encompassed by the invention. Such fusion proteins can, for example, facilitate purification and can increase half-life in vivo. Antibodies fused or conjugated to the polypeptides of the present invention can also be used in in vitro immunoassays and purification methods using methods known in the art. See, e.g., Harbor et al., supra, and PCT publication WO 93/21232; EP 439, 095; Naramura et al., 1994, Immunol. Lett., 39:91-99; U.S. Pat. No. 5,474,981; Gillies et al., 1992, Proc. Natl. Acad. Sci. USA, 89:1428-1432; Fell et al., 1991, J. Immunol., 146:2446-2452, which are incorporated by reference herein in their entireties. For guidance, chimeric proteins having the first two domains of the human CD4 polypeptide and various domains of the constant regions of the heavy or light chains of mammalian immunoglobulins have been described. (EP 394,827; Traunecker et al., 1988, Nature, 331:84-86). NF-κB pathway-associated polypeptide or peptide fused or conjugated to an antibody, or portion thereof, having disulfide-linked dimeric structures (due to the IgG), for example, can also be more efficient in binding and neutralizing other molecules, than the monomeric secreted protein or protein fragment alone. (Fountoulakis et al., 1995, J. Biochem., 270:3958-3964).

[0217] The present invention further includes compositions comprising the NF-κpathway-associated polypeptides or peptides thereof fused or conjugated to antibody domains other than the variable region domain. For example, the polypeptides of the present invention can be fused or conjugated to an antibody Fc region, or portion thereof. The antibody portion fused to a polypeptide of the present invention can comprise the constant region, hinge region, CH1 domain, CH2 domain, CH3 domain, or any combination of whole domains or portions thereof. The polypeptides can also be fused or conjugated to the above antibody portions to form multimers. For example, Fc portions fused to the polypeptides of the present invention can form dimers through disulfide bonding between the Fc portions. Higher multimeric forms can be made by fusing the polypeptides to portions of IgA and IgM. Methods for fusing or conjugating polypeptides to antibody portions are known in the art. (See, e.g., U.S. Pat. Nos. 5,336,603; 5,622,929; 5,359,046; 5,349,053; 5,447,851; 5,112,946; EP 307,434; EP 367,166; PCT publications WO 96/04388; WO 91/06570; Ashkenazi et al., 1991, Proc. Natl. Acad Sci. USA, 88:10535-10539; Zheng et al., 1995, J. Immunol., 154:5590-5600; and Vil et al., Proc. Natl. Acad. Sci. USA, 89:11337-11341, which are hereby incorporated by reference herein in their entireties).

[0218] In many cases, the Fc portion in a fusion protein is beneficial in therapy, diagnosis, and/or screening methods, and thus can result in, for example, improved pharmacokinetic properties. (EP A 232, 262). In drug discovery, for example, human proteins, such as hIL-5, have been fused with Fc portions for the purpose of high-throughput screening assays to identify antagonists of hIL-5. (See, Bennett et al., 1995, J. Molecular Recognition, 8:52-58; and Johanson et al., 1995, J. Biol. Chem., 270:9459-9471). Alternatively, deleting the Fc portion after the fusion protein has been expressed, detected, and purified, may be desired. For example, the Fc portion may hinder therapy and diagnosis if the fusion protein is used as an antigen for immunizations.

[0219] Moreover, according to this invention, anti-NF-κB pathway-associated antibodies or fragments thereof can be fused to marker sequences, such as a peptide, to facilitate their purification. In preferred embodiments, the marker amino acid sequence is a hexa-histidine peptide, such as the tag provided in a pQE vector (QIAGEN, Inc., Chatsworth, Calif.), among others, many of which are commercially available. As described in Gentz et al., 1989, Proc. Natl. Acad. Sci. USA, 86:821-824, for instance, hexa histidine provides for convenient purification of the fusion protein. Other peptide tags useful for purification include, but are not limited to, the “HA” tag and the Flag tag, as previously described herein.

[0220] The present invention further encompasses antibodies or fragments thereof conjugated to a diagnostic or therapeutic agent. The antibodies can be used diagnostically, for example, to monitor the development or progression of a tumor as part of a clinical testing procedure, or to determine the efficacy of a given treatment regimen. Detection can be facilitated by coupling the antibody to a detectable substance. Nonlimiting examples of detectable substances include various enzymes, prosthetic groups, fluorescent materials, luminescent materials, bioluminescent materials, radioactive materials, positron emitting metals using various positron emission tomographies, and nonradioactive paramagnetic metal ions. The detectable substance can be coupled or conjugated either directly to the antibody (or fragment thereof) or indirectly, through an intermediate (such as, for example, a linker as known in the art) using techniques known in the art. (See, for example, U.S. Pat. No. 4,741,900 for metal ions which can be conjugated to antibodies for use as diagnostics according to the present invention).

[0221] Nonlimiting examples of suitable detectable enzymes include horseradish peroxidase, alkaline phosphatase, beta-galactosidase, or acetylcholinesterase; Nonlimiting examples of suitable prosthetic group complexes include streptavidin/biotin and avidinibiotin; nonlimiting examples of suitable fluorescent materials include umbelliferone, fluorescein, fluorescein isothiocyanate, rhodamine, dichlorotriazinylamine fluorescein, dansyl chloride or phycoerythrin; a nonlimiting example of a luminescent material includes luminol; nonlimiting examples of bioluminescent materials include luciferase, luciferin, and aequorin; and nonlimiting examples of suitable radioactive material include iodine (¹²⁵I, ¹³¹I), carbon (¹⁴C), sulfur (3 sus), tritium (³H), indium (¹¹¹In and other radioactive isotopes of inidium), technetium (⁹⁹Tc, ^{99m}Tc), thallium (20′Ti), gallium (⁶⁸Ga, ⁶⁷Ga), palladium (¹⁰³Pd), molybdenum (⁹⁹Mo), xenon (¹³³Xe), fluorine (¹⁹F), ¹⁵³Sm, ¹⁷⁷Lu, radioactive Gd, radioactive Pm, radioactive La, radioactive Yb, ¹⁶⁶Ho,⁹⁰Y, radioactive Sc, radioactive Re, radioactive Re, ¹⁴²Pr, ¹⁰⁵Rh, and ⁹⁷Ru.

[0222] In specific aspects, the NF-κB pathway-associated protein or a peptide portion thereof is attached to macrocyclic chelators useful for conjugating radiometal ions, including, but not limited to, ¹¹¹In, ¹⁷⁷Lu, ⁹⁰Y, ¹⁶⁶Ho, and ¹⁵³Sm, to polypeptides. In a preferred aspect, the radiometal ion associated with the macrocyclic chelators attached to the NF-κB pathway-associated protein or peptide is ¹¹¹In. In another preferred aspect, the radiometal ion associated with the macrocyclic chelator attached to the NF-κB pathway-associated protein or peptide is ⁹⁰Y. In specific aspects, the macrocyclic chelator is 1,4,7,10-tetraazacyclododecane-N,N′,N″,N′″-tetraacetic acid (DOTA). In other specific aspects, the DOTA is attached to the NF-κB pathway-associated protein or peptide via a linker molecule.

[0223] Examples of linker molecules useful for conjugating DOTA to a polypeptide are commonly known in the art. (See, for example, DeNardo et al., 1998, Clin. Cancer Res., 4(10):2483-90; Peterson et al., 1999, Bioconjug. Chem., 10(4):553-557; and Zimmerman et al, 1999, Nucl. Med. Biol., 26(8):943-950, which are hereby incorporated by reference in their entirety. In addition, U.S. Pat. Nos. 5,652,361 and 5,756,065, which disclose chelating agents that can be conjugated to antibodies and methods for making and using them, are hereby incorporated by reference in their entireties. Although U.S. Pat. Nos. 5,652,361 and 5,756,065 focus on conjugating chelating agents to antibodies, one skilled in the art can readily adapt the methods disclosed therein in order to conjugate chelating agents to other polypeptides. Antibodies can also be attached to solid supports, which are particularly useful for immunoassays or purification of the target antigen. Such solid supports include, but are not limited to, glass, cellulose, polyacrylamide, nylon, polystyrene, polyvinyl chloride or polypropylene.

[0224] Techniques for conjugating therapeutic moieties to antibodies are well known, see, e.g., Arnon et al., “Monoclonal Antibodies For Immunotargeting Of Drugs In Cancer Therapy”, In: Monoclonal Antibodies And Cancer Therapy, Reisfeld et al. (eds.), pp. 243-56, Alan R. Liss, Inc., 1985; Hellstrom et al., “Antibodies For Drug Delivery”, In: Controlled Drug Delivery (2nd Ed.), Robinson et al. (eds.), pp. 623-53, Marcel Deldcer, Inc., 1987; Thorpe, “Antibody Carriers Of Cytotoxic Agents In Cancer Therapy: A Review”, In: Monoclonal Antibodies '84: Biological And Clinical Applications, Pinchera et al. (eds.), pp. 475-506, 1985; “Analysis, Results, And Future Prospective Of The Therapeutic Use Of Radiolabeled Antibody In Cancer Therapy”, In: Monoclonal Antibodies For Cancer Detection And Therapy, Baldwin et al. (eds.), pp. 303-316, Academic Press, 1985; and. Thorpe et al., 1982, “The Preparation And Cytotoxic Properties Of Antibody-Toxin Conjugates”, Immunol. Rev., 62:119-158. Alternatively, an antibody can be conjugated to a second antibody to form an antibody heteroconjugate, e.g., as described in U.S. Pat. No. 4,676,980 to Segal, which is incorporated herein by reference in its entirety. An antibody, i.e., an antibody specific for NF-κB pathway-associated protein, with or without a therapeutic moiety conjugated to it, and administered alone or in combination with cytotoxic factor(s) and/or cytokine(s), can be used as a therapeutic.

[0225] The antibodies of the invention can be utilized for immunophenotyping of cell lines and biological samples. The translation product of the NF-κB pathway-associated protein-encoding nucleic acid can be useful as cell specific marker(s), or more specifically, as cellular marker(s) that are differentially expressed at various stages of differentiation and/or maturation of particular cell types (e.g., in particular tissues). Monoclonal antibodies directed against a specific epitope, or combination of epitopes, allow for the screening of cellular populations expressing the marker. Various techniques utilizing monoclonal antibodies can be employed to screen for cellular populations expressing the marker(s), including magnetic separation using antibody-coated magnetic beads, “panning” with antibody(ies) attached to a solid matrix (i.e., tissue culture plate), and flow cytometry (See, e.g., U.S. Pat. No. 5,985,660; and Morrison et al., 1999, Cell, 96:737-749). The above techniques allow for the screening of particular populations of cells, such as might be found with cancers or malignancies (i.e., minimal residual disease (MRD), for example, in lung cancer patients) and “non-self” cells in transplantations to prevent graft-versus-host disease (GVHD).

[0226] Anti-NF-κB pathway-associated protein antibodies according to this invention can be assayed for immunospecific binding by any method known in the art. The immunoassays which can be used include, but are not limited to, competitive and non-competitive assay systems using techniques such as BIAcore analysis, FACS (Fluorescence Activated Cell Sorter) analysis, immunofluorescence, immunocytochemistry, Western blots, radioimmunoassays, ELISA (enzyme linked immunosorbent assays), “sandwich” immunoassays, immunoprecipitation assays, precipitin reactions, gel diffusion precipitin reactions, immunodiffusion assays, agglutination assays, complement fixation assays, immunoradiometric assays, fluorescent immunoassays, protein A immunoassays, to name but a few. Such assays are routine and well known and practiced in the art (see, e.g., Ausubel et al, eds, 1994, Current Protocols in Molecular Biology, Vol. 1, John Wiley & Sons, Inc., New York, which is incorporated by reference herein in its entirety). Nonlimiting, exemplary immunoassays are described briefly below.

[0227] Immunoprecipitation protocols generally comprise lysing a population of cells in a lysis buffer such as RIPA buffer (i.e., 1% NP-40 or Triton X-100, 1% sodium deoxycholate, 0.1% SDS, 0.15 M NaCl, 0.01 M sodium phosphate at pH 7.2, 1% Trasylol) supplemented with protein phosphatase and/or protease inhibitors (e.g., EDTA, PMSF, aprotinin, sodium vanadate); adding the antibody of interest to the cell lysate; incubating for a period of time (e.g., 1 to 4 hours) at 4° C.; adding protein A and/or protein G sepharose beads to the cell lysate; incubating for about 60 minutes or more at 4° C.; washing the beads in lysis buffer; and resuspending the beads in SDS/sample buffer. The ability of the antibody of interest to immunoprecipitate a particular antigen can be assessed by, for example, Western blot analysis. One of skill in the art would be knowledgeable as to the parameters that can be modified to increase the binding of the antibody to an antigen and decrease the background (e.g., pre-clearing the cell lysate with sepharose beads). For further discussion regarding immunoprecipitation protocols, see, e.g., Ausubel et al, eds, 1994, Current Protocols in Molecular Biology, Vol. 1, John Wiley & Sons, Inc., New York, at 10.16.1.

[0228] Western blot analysis generally comprises preparing protein samples; electrophoresis of the protein samples in a polyacrylamide gel (e.g., 8%-20% SDS PAGE depending on the molecular weight of the antigen); transferring the protein sample from the polyacrylamide gel to a solid support membrane such as nitrocellulose, PVDF or nylon; blocking the membrane in blocking solution (e.g., PBS with 3% BSA or nonfat milk); washing the membrane in washing buffer (e.g., PBS-Tween 20); blocking the membrane with primary antibody (the antibody of interest) diluted in blocking buffer; washing the membrane in washing buffer; blocking the membrane with a secondary antibody (which recognizes the primary antibody, e.g., an anti-human antibody) conjugated to an enzymatic substrate (e.g., horseradish peroxidase or alkaline phosphatase) or radioactive molecule (e.g., ³²P or ¹²⁵I) diluted in blocking buffer; washing the membrane in wash buffer; and detecting the presence of the antigen. One of skill in the art would be knowledgeable as to the parameters that can be modified to increase the signal detected and to reduce the background noise. For further discussion regarding Western blot protocols, see, e.g., Ausubel et al, eds, 1994, Current Protocols in Molecular Biology, Vol. 1, John Wiley & Sons, Inc., New York, at 10.8.1.

[0229] ELISAs comprise preparing antigen; coating the wells of a 96 well microtiter plate with antigen; adding to the wells the antibody of interest conjugated to a detectable compound such as an enzymatic substrate (e.g., horseradish peroxidase or alkaline phosphatase); incubating for a period of time; and detecting the presence of the antigen. In ELISAs, the antibody of interest does not have to be conjugated to a detectable compound; instead, a second antibody (which recognizes the antibody of interest) conjugated to a detectable compound can be added to the wells. Further, instead of coating the wells with antigen, the antibody can be first coated onto the well. In this case, a second antibody conjugated to a detectable compound can be added to the antibody-coated wells following the addition of the antigen of interest. One of skill in the art would be knowledgeable as to the parameters that can be modified to increase the signal detected, as well as other variations of ELISAs known in the art. For further discussion regarding ELISAs, see, e.g., Ausubel et al, eds, 1994, Current Protocols in Molecular Biology, Vol. 1, John Wiley & Sons, Inc., New York, at 1 1.2.1.

[0230] The binding affinity of an antibody to an antigen and the off-rate of an antibody-antigen interaction can be determined by competitive binding assays. One example of a competitive binding assay is a radioimmunoassay (RIA) involving the incubation of labeled antigen (e.g., ³H or 125I), or a fragment or variant thereof, with the antibody of interest in the presence of increasing amounts of labeled antigen, and the detection of the antibody bound to the labeled antigen. The affinity of the antibody of interest for the NF-κB pathway-associated protein and the binding off rates can be determined from the data by Scatchard plot analysis. Competition with a second antibody can also be determined using RIAs. In this case, the NF-κB pathway-associated protein is incubated with antibody of interest conjugated to a labeled compound (e.g., a compound labeled with ³H or ¹²⁵I) in the presence of increasing amounts of an unlabeled second antibody. This kind of competitive assay between two antibodies, can also be used to determine if two antibodies bind to the same or to different epitopes of the same molecule.

[0231] In a preferred aspect, BlAcore kinetic analysis is used to determine the binding on and off rates of antibodies (including antibody fragments or variants thereof) to the NF-κB pathway-associated proteins, or fragments of the NF-κB pathway-associated proteins. Kinetic analysis comprises analyzing the binding and dissociation of antibodies from chips with immobilized NF-κB pathway-associated proteins on the chip surface.

### Methods of Diagnosis of NF-κB Related Disorders and Diseases

[0232] The present invention also relates to methods and compositions for the diagnosis of NF-κB pathway-related disorders, diseases and conditions. Such methods comprise, for example, measuring expression of the NF-κB pathway-associated polypeptide genes, or peptide-encoding fragments thereof, in a patient sample, or detecting a mutation in the gene in the genome of an individual suspected of exhibiting NF-κB pathway-related dysfunction. NF-κB pathway-associated nucleic acid molecules can also be used as diagnostic hybridization probes, or as primers, for diagnostic PCR analysis to identify gene mutations, allelic variations, or regulatory defects, such as defects in the expression of the gene, which can serve as indicators of susceptibility to NF-κB pathway disorder, or a lack thereof. Such diagnostic PCR analyses can be used to diagnose individuals with NF-κB disorder associated mutation, allelic variation, or regulatory defects in a NF-κB pathway-associated gene.

[0233] Methods of the invention for the diagnosis, screening and/or prognosis of NF-κB pathway-related diseases, disorders and conditions can utilize reagents such as the NF-κB pathway-associated nucleic acid molecules and sequences or antibodies directed against the proteins or polypeptides, including peptide fragments thereof. Specifically, such reagents can be used, for example, for: (1) the detection of the presence of NF-κB pathway-associated polypeptide gene mutations, or the detection of either over- or under-expression of NF-κB pathway-associated polypeptide gene mRNA relative to the disease state, or the qualitative or quantitative detection of alternatively-spliced forms of peptide transcripts which may correlate with NF-κB pathway-related disorders or susceptibility to such disorders; and (2) the detection of either an over- or an under-abundance of the NF-κB pathway-associated gene product relative to the disease state or the presence of a modified (e.g., less than full length) gene product which correlates with a NF-κB pathway dysfunctional state or a progression toward such a state. In addition, such NF-κB pathway-associated reagents can be used in methods for the screening, diagnosis and/or prognosis of diseases, disorders, and/or conditions, that are associated with NF-κB activation, with the activity or function of component molecules of the NF-κB pathway, or with other cell signaling molecules.

[0234] The methods described herein may be performed, for example, by utilizing pre-packaged diagnostic test kits comprising at least one specific NF-κB pathway-associated nucleic acid or antibody reagent described herein, which can be conveniently used, e.g., in clinical or laboratory settings, to screen and diagnose patients exhibiting NF-κB pathway-related conditions or symptoms related thereto, or to screen and identify those individuals exhibiting a predisposition or susceptibility to NF-κB pathway related conditions.

[0235] For the detection of NF-κB pathway-associated polypeptide mutations, any nucleated cell can be used as a starting source for genomic nucleic acid. For the detection of NF-κB pathway-associated polypeptide transcripts or gene products, any cell type or tissue in which the NF-κB pathway-associated polypeptide genes are expressed can be employed.

### Detection of NF-κB Pathway-Associated Nucleic Acid Molecules

[0236] Mutations or polymorphisms within the NF-κB pathway-associated polypeptide genes can be detected by utilizing a number of techniques. As stated above, nucleic acids from any nucleated cell can be used as the starting point for such assay techniques, and can be isolated according to standard nucleic acid preparation procedures which are well known to those of skill in the art.

[0237] Genomic DNA can be used in hybridization or amplification assays of biological samples to detect abnormalities involving the NF-κB pathway-associated polypeptide gene structures, including point mutations, insertions, deletions and chromosomal rearrangements. Such assays can include, but are not limited to, direct sequencing (C. Wong et al., 1987, Nature, 330:384-386), single stranded conformational polymorphism analyses (SSCP; M. Orita et al., 1989, Proc. Natl. Acad. Sci. USA, 86:2766-2770), heteroduplex analysis (T. J. Keen et al., 1991, Genomics, 11:199-205; D. J. Perry and R. W. Carrell, 1992), denaturing gradient gel electrophoresis (DGGE; R. M. Myers et al., 1985, Nucl. Acids Res., 13:3131-3145), chemical mismatch cleavage (R. associated G. Cotton et al., 1988, Proc. Natl. Acad. Sci. USA, 85:4397-4401) and oligonucleotide hybridization (R. B. Wallace et al., 1981, Nucl. Acids Res., 9:879-894; R. J. Lipshutz et al., 1995, Biotechniques, 19:442-447).

[0238] Diagnostic methods for the detection of NF-κB pathway nucleic acid molecules, in patient samples or other appropriate cell sources, can involve the amplification of specific gene sequences, e.g., by PCR, followed by the analysis of the amplified molecules using techniques well known to those of skill in the art, such as, for example, those listed above. Utilizing analysis techniques such as these, the amplified sequences can be compared to those that would be expected if the nucleic acid being amplified contained only normal copies of the NF-κB pathway-associated genes, in order to determine whether a gene mutation exists, for example, a mutation that correlates with NF-κB pathway-related disorders and conditions or susceptibility for same.

[0239] Quantitative and qualitative aspects of NF-κB pathway-associated gene expression can also be assayed. For example, RNA from a cell type or tissue known or suspected to express a NF-κB pathway-associated gene can be isolated and tested utilizing hybridization or PCR techniques as described and known in the art. The isolated cells can be derived from cell culture or from a patient. The analysis of cells taken from culture may be a necessary step in the assessment of cells to be used as part of a cell-based gene therapy technique or, alternatively, to test the effect of compounds on the expression of the gene. Such analyses can reveal both quantitative and qualitative aspects of the expression pattern of the NF-κB pathway-associated genes, including activation or inactivation of gene expression or presence of alternatively spliced transcripts.

[0240] In one aspect of such a detection scheme, a cDNA molecule is synthesized from an RNA molecule of interest (e.g., a NF-κB pathway-associated polypeptide, by reverse transcription of the RNA molecule into cDNA). All or part of the resulting cDNA is then used as the template for a nucleic acid amplification reaction, such as a PCR amplification reaction, or the like. The nucleic acid reagents used as synthesis initiation reagents (e.g., primers) in the reverse transcription and nucleic acid amplification steps of this method are chosen from the NF-κB pathway-associated nucleic acid sequences. The preferred lengths of such nucleic acid reagents are at least 9-30 nucleotides.

[0241] For detection of the amplified product, the nucleic acid amplification can be performed using radioactively or non-radioactively labeled nucleotides. Alternatively, enough amplified product can be made so that the product can be visualized by standard ethidium bromide staining or by utilizing any other suitable nucleic acid staining protocol, or, for example, quantitative PCR. Such RT-PCR techniques can be utilized to detect differences in NF-κB pathway-associated transcript size that may be due to normal or abnormal alternative splicing. In addition, such techniques can be utilized, for example, to detect quantitative differences between levels of full length and/or alternatively-spliced transcripts detected in normal individuals relative to those in individuals exhibiting NF-κB related conditions or disorders, or exhibiting a predisposition to such disorders.

[0242] As an alternative to amplification techniques, standard Northern analyses can be performed if a sufficient quantity of the appropriate cells can be obtained. Utilizing such techniques, quantitative as well as size-related differences between NF-κB pathway-associated polypeptide transcripts can also be detected. In addition, it is possible to perform NF-κB pathway-associated gene expression assays in situ, i.e., directly upon tissue sections (fixed and/or frozen) of patient tissue obtained from biopsies or resections, such that no nucleic acid purification is necessary. NF-κB pathway-associated nucleic acid molecules can be used as probes and/or primers for such in situ procedures (see, for example, G. J. Nuovo, 1992, PCR In Situ Hybridization: Protocols And Applications, Raven Press, New York).

### Detection of NF-κB Pathway-Associated Polypeptides, Proteins, or Gene Products

[0243] Antibodies directed against wild type or mutant NF-κB pathway-associated gene products, or conserved variants or peptide fragments thereof, as described above, can also be used for the diagnosis and prognosis of NF-κB related disorders. Such diagnostic methods can be used to detect abnormalities in the level of gene expression or abnormalities in the structure and/or temporal, tissue, cellular, or subcellular location of NF-κB pathway-associated polypeptide gene products. Antibodies, or fragments of antibodies, can be used to screen potentially therapeutic compounds in vitro to determine their effects on NF-κB pathway-associated gene expression and peptide production. The compounds that have beneficial effects on NF-κB related disorders can be identified and a therapeutically effective dose determined.

[0244] In vitro immunoassays can be used, for example, to assess the efficacy of cell-based gene therapy for the treatment of NF-κB related disorders. For example, antibodies directed against NF-κB pathway-associated polypeptides or peptides may be used in vitro to determine the level of NF-κB pathway-associated gene expression found in cells that have been genetically engineered to produce NF-κB pathway-associated polypeptides or peptides. Such analysis allows for a determination of the number of transformed cells necessary to achieve therapeutic efficacy in vivo, as well as optimization of the gene replacement protocol.

[0245] The tissue or cell type to be analyzed generally includes those that are known, or suspected, to express the NF-κB pathway-associated polypeptide genes. Protein isolation methods employed can be those as described in Harlow, E. and Lane, D., 1988, Antibodies: A Laboratory Manual, Cold Spring Harbor Laboratory Press, Cold Spring Harbor, N.Y., for example. The isolated cells can be derived from cell culture or from a patient. The analysis of cells taken from culture may be a necessary step in the assessment of cells to be used as part of a cell-based gene therapy technique or, alternatively, to test the effect of compounds on the expression of the gene.

[0246] Preferred diagnostic methods for the detection of the NF-κB pathway-associated gene products or conserved variants or peptide fragments thereof, may involve, for example, immunoassays wherein the gene product or conserved variants, including gene products which are the result of alternatively-spliced transcripts, or peptide fragments, are detected by their interaction with an anti-NF-κB-associated polypeptide -specific antibody. For example, antibodies, or fragments of antibodies, such as described above, can be used to detect both quantitatively or qualitatively the presence of the NF-κB-associated gene product or conserved variants or peptide fragments thereof. The antibodies (or fragments thereof) can also be employed histologically, for example, in immunofluorescence or immunoelectron microscopy, for in situ detection of the NF-κB pathway-associated protein or conserved variants or peptide fragments thereof. In situ detection is carried out by removing a histological specimen from a patient, and applying thereto a labeled antibody according to this invention. The antibody (or antibody fragment) is preferably applied by overlaying the labeled antibody (or fragment) onto a biological sample. Through the use of such a procedure, it is possible to determine not only the presence of the NF-κB pathway-associated gene product, or conserved variants or peptide fragments, but also its distribution in the examined tissue. The skilled practitioner will readily perceive that any of a wide variety of histological methods (such as staining procedures) can be modified in order to achieve such in situ detection.

[0247] Immunoassays for detecting NF-κB pathway-associated polypeptides or conserved variants or peptide fragments thereof typically comprise incubating a sample, such as a biological fluid, a tissue extract, freshly harvested cells, or lysates of cells which have been incubated in cell culture, in the presence of a detectably labeled antibody capable of binding NF-κB pathway-associated proteins or conserved variants or peptide fragments thereof, and detecting the bound antibody-protein complex by any of a number of techniques well-known in the art.

[0248] The biological sample can be brought into contact with and immobilized onto a solid phase support or carrier such as nitrocellulose, nylon membrane, PVDF membrane, or other solid support that is capable of immobilizing cells, cell particles or soluble proteins. The support can then be washed with suitable buffers followed by treatment with the detectably labeled antibody specific for a NF-κB pathway-associated polypeptide. The solid phase support is washed with the buffer a second time to remove unbound antibody. The amount of bound label on the solid support is then detected by conventional means.

[0249] A “solid phase support or carrier” refers to any support capable of binding an antigen or an antibody. Well-known supports or carriers include glass, polystyrene, polypropylene, polyethylene, dextran, nylon, amylases, natural and modified celluloses, polyacrylamides, gabbros, and magnetite. The nature of the carrier can be either soluble to some extent or insoluble. The support material can have virtually any possible structural configuration so long as the coupled molecule is capable of binding to an antigen or antibody. Thus, the support configuration can be spherical, as in a bead, or cylindrical, as in the inside surface of a test tube, or the external surface of a rod. Alternatively, the surface can be flat such as a sheet, test strip, etc. Preferred supports include polystyrene beads. Those skilled in the art will know many other suitable carriers for binding antibody or antigen, or will be able to ascertain the same by use of routine experimentation.

[0250] The binding activity of an anti-NF-κB pathway-associated polypeptide antibody can be determined according to well-known methods. Those skilled in the art will be able to determine operative and optimal assay conditions for each determination by employing routine experimentation. One of the ways in which an NF-κB pathway-associated polypeptide -specific antibody can be detectably labeled is by linking the antibody to an enzyme in an enzyme linked immunoassay (ELISA) (A. Voller “The Enzyme Linked Immunosorbent Assay (ELISA)”, 1978, Diagnostic Horizons 2:1-7, Microbiological Associates Quarterly Publication, Walkersville, Md.); A. Voller et al., 1978, J. Clin. Pathol., 31:507-520; J. E. Butler, 1981, Meth. Enzymol., 73:482-523; E. Maggio (ed.), 1980, Enzyme Immunoassay, CRC Press, Boca Raton, Fla.; E. Ishikawa et al., (eds.), 1981, Enzyme Immunoassay, Kgaku Shoin, Tokyo). The enzyme that is bound to the antibody reacts with an appropriate substrate, preferably a chromogenic substrate, in such a manner as to produce a chemical moiety that can be detected, for example, by spectrophotometric, fluorometric or visual means. Examples of enzymes that can be used to detectably label an antibody include, but are not limited to, malate dehydrogenase, staphylococcal nuclease, delta-5-steroid isomerase, yeast alcohol dehydrogenase, alpha-glycerophosphate, dehydrogenase, triose phosphate isomerase, horseradish peroxidase, alkaline phosphatase, asparaginase, glucose oxidase, beta-galactosidase, ribonuclease, urease, catalase, glucose-6-phosphate dehydrogenase, glucoamylase and acetylcholinesterase. The detection can be accomplished by colorimetric methods that employ a chromogenic substrate for the enzyme. Detection can also be accomplished by visual comparison of the extent of enzymatic reaction of a substrate compared with similarly prepared standards.

[0251] Detection can also be achieved using any of a variety of other immunoassays. For example, by radioactively labeling the antibodies or antibody fragments, it is possible to detect NF-κB pathway-associated proteins or peptides through the use of a radioimmunoassay (RIA) (see, for example, B. Weintraub, Principles of Radioimmunoassays, Seventh Training Course on Radioligand Assay Techniques, The Endocrine Society, March, 1986. The radioactive isotope can be detected by using a gamma counter or a scintillation counter or by autoradiography.

[0252] It is also possible to label the antibody with a fluorescent compound. When the fluorescently labeled antibody is exposed to light of the proper wavelength, its presence can then be detected due to fluorescence (emission of light of a different wavelength). Among the most commonly used fluorescent labeling compounds are fluorescein isothiocyanate, rhodamine, phycoerythrin, phycocyanin, allophycocyanin, o-phthaldehyde and fluorescamine. The antibody can also be detectably labeled using fluorescence emitting metals such as ¹⁵²Eu, or others of the lanthanide series. These metals can be attached to the antibody using such metal chelating groups as diethylenetriaminepentacetic acid (DTPA) or ethylenediaminetetraacetic acid (EDTA).

[0253] The antibody also can be detectably labeled by coupling it to a chemiluminescent compound. The presence of the chemiluminescent-tagged antibody is then determined by detecting the presence of luminescence that arises during the course of a chemical reaction. Examples of particularly useful chemiluminescent labeling compounds are luminol, isoluminol, theromatic acridinium ester, imidazole, acridinium salt and oxalate ester.

[0254] Similarly, a bioluminescent compound can be used to label antibodies against NF-κB pathway-associated polypeptides. Bioluminescence is a type of chemiluminescence found in biological systems in which a catalytic protein increases the efficiency of the chemiluminescent reaction. The presence of a bioluminescent protein is determined by detecting the presence of luminescence. Illustrative bioluminescent compounds for the purposes of bioluminescent labeling include luciferin, luciferase and aequorin.

### Methods and Compositions for the Treatment of NF-κB-Mediated Diseases and Disorders Linked to NF-κB Pathway-Associated Polypeptides and/or Modulators Thereof

[0255] The present invention also relates to methods and compositions for the treatment, amelioration, modulation and/or prevention of NF-κB pathway-related disorders that are mediated or regulated by NF-κB pathway-associated polypeptide expression or function, e.g., polypeptide phosphorylation or activation, interaction with signal transduction molecules or cellular regulatory factor molecules or release, or by NF-κB pathway-associated protein modulation, and the like. Further, NF-κB pathway-associated protein effector functions can be modulated via such methods and compositions. Moreover, as described herein, the present invention relates to the treatment, amelioration, modulation, and/or prevention of a variety of other diseases or disorders involving the modulation of NF-κB activity or function, or the activity or function of NF-κB associated molecules, through NF-κB pathway-associated polypeptides or polypeptide modulation.

[0256] The methods in accordance with this aspect of the invention include those that modulate NF-κB pathway-associated polypeptides and polypeptide activity product activity. In certain instances, the treatment will require an increase, enhancement, upregulation or activation of NF-κB pathway-associated polypeptide activity, while in other instances, the treatment will require a decrease, reduction, down-regulation or suppression of NF-κB pathway-associated polypeptide activity. “Increase” and “decrease” refer to the differential levels of NF-κB pathway-associated polypeptide activity relative to polypeptide activity in the cell type of interest in the absence of modulatory treatment. Similarly, an “increase” or “decrease” in NF-κB pathway-mediated activity refers to the differential levels of NF-κB-mediated activity (e.g. transcription, gene expression, signal transduction) relative to NF-κB activity in a cell in the absence of modulatory treatment. Methods that can either increase or decrease NF-κB pathway-associated polypeptide activity and/or NF-κB-mediated events depending on the particular manner in which the method is practiced are further described below.

### Methods Associated with a Decrease of NF-κB Pathway-Associated Protein Activity

[0257] Treatment of certain NF-κB pathway-related conditions and disorders can be achieved by methods which serve to decrease NF-κB pathway-associated protein activity. Activity can be decreased directly, e.g., by decreasing the NF-κB pathway-associated gene product, i.e., protein, activity and/or by decreasing the level of gene expression. For example, compounds such as those identified through the methods and assays described above that decrease NF-κB pathway-associated protein activity can be used in accordance with the invention to ameliorate, reduce or abolish symptoms associated with certain NF-κB pathway-related conditions and disorders. As discussed above, such molecules can include, but are not limited to, peptides, including soluble peptides, and small organic or inorganic molecules, i.e., NF-κB pathway-associated protein antagonists. Techniques for the determination of effective doses and administration of such compounds are described herein.

### Antisense, Ribozymes, and Triple Helix Formation

[0258] In addition, antisense and ribozyme molecules that inhibit NF-κB pathway-associated gene expression can also be used to reduce the level of NF-κB pathway-associated gene expression, thus effectively reducing the level of protein present in a cell, thereby decreasing the level of protein activity, or modulation that occurs in the cell. In addition, antisense molecules and small interfering RNAs molecules of NF-κB pathway-associated proteins, and the like, can be used to modulate or affect the function of molecules which are regulated or mediated by, interact with, and/or are recipients of downstream effects of NF-κB pathway-associated proteins in a cell. Still further, triple helix molecules can be utilized in reducing the level of NF-κB pathway-associated protein gene expression. Such molecules can be designed to reduce or inhibit either wild type, or if appropriate, mutant NF-κB pathway-associated protein target gene activity. Techniques for the production and use of such molecules are well known to those having skill in the art.

[0259] As is understood by the skilled practitioner, antisense approaches involve the design of oligonucleotides (either DNA or RNA) that are complementary to mRNA of the NF-κB pathway-associated protein gene sequence or a portion thereof. In a specific embodiment, the antisense molecules are complementary to the mRNA of the polypeptides encoded by the sequences shown in Tables 1-6. The antisense oligonucleotides will bind to the complementary NF-κB pathway-associated gene mRNA transcripts and prevent translation. Absolute complementarity, although preferred, is not required. A sequence “complementary” to a portion of an RNA, as referred to herein, means a sequence having sufficient complementarity to be able to hybridize with the RNA, and form a stable duplex. In the case of double-stranded antisense nucleic acids, a single strand of the duplex DNA may thus be tested, or triplex formation may be assayed. The ability to hybridize depends upon both the degree of complementarity and the length of the antisense nucleic acid. Generally, the longer the hybridizing nucleic acid, the more base mismatches with an RNA it may contain and still form a stable duplex (or triplex, as the case may be). One skilled in the art can ascertain a tolerable degree of mismatch by using of standard procedures and practice to determine the melting point of the hybridized complex.

[0260] Oligonucleotides that are complementary to the 5′ end of the message, e.g., the 5′ untranslated sequence up to and including the AUG initiation codon, typically work most efficiently at inhibiting translation. However, sequences complementary to the 3′ untranslated sequences of mRNAs have recently been shown to be effective at inhibiting translation of mRNAs as well. (See, generally, R. Wagner, 1994, Nature, 372:333-335). Thus, oligonucleotides complementary to either the 5′ or 3′ untranslated (UTR), non-coding regions of the NF-κB pathway-associated nucleic acids could be used in an antisense approach to inhibit translation of endogenous NF-κB pathway-associated gene mRNA.

[0261] Oligonucleotides complementary to the 5′ untranslated region of the mRNA preferably include the complement of the AUG start codon. Antisense oligonucleotides complementary to mRNA coding regions are less efficient inhibitors of translation, but can be used in accordance with the invention. Whether designed to hybridize to the 5′ UTR, 3′ UTR or coding region of a target or pathway gene mRNA, antisense nucleic acids are preferably at least six nucleotides in length, and are preferably oligonucleotides ranging from 6 to about 50 nucleotides in length. In specific aspects, the oligonucleotide is at least 10 nucleotides, at least 17 nucleotides, at least 25 nucleotides, at least 26 nucleotides, or at least 50 nucleotides.

[0262] Regardless of the choice of target sequence, it is preferred that in vitro studies are first performed to quantify the ability of the antisense oligonucleotide to inhibit gene expression. It is preferred that these studies utilize controls that distinguish between antisense gene inhibition and non-specific biological effects of oligonucleotides. It is also preferred that these studies compare levels of the target RNA or protein with that of an internal control RNA or protein. In addition, results obtained using the antisense oligonucleotide are preferably compared with those obtained using a control oligonucleotide. It is also preferred that the control oligonucleotide is of approximately the same length as the antisense oligonucleotide and that the nucleotide sequence of the control oligonucleotide differs from the antisense sequence no more than is necessary to prevent specific hybridization to the target sequence.

[0263] The oligonucleotides can be DNA, RNA, or chimeric mixtures, derivatives, or modified versions thereof, single-stranded or double-stranded. Double stranded RNA's may be designed based upon the teachings of Paddison et al., Proc. Nat. Acad. Sci., 99:1443-1448 (2002); and International Publication Nos. WO 01/29058, and WO 99/32619; which are hereby incorporated herein by reference. The oligonucleotide can be modified at the base moiety, sugar moiety, or phosphate backbone, for example, to improve stability of the molecule, hybridization, etc. The oligonucleotide may also include other appended groups such as peptides (e.g., for targeting host cell receptors in vivo), or agents for facilitating transport across the cell membrane (see, e.g., Letsinger et al., 1989, Proc. Natl. Acad. Sci. USA., 86:6553-6556; Lemaitre et al., 1987, Proc. Natl. Acad. Sci. USA, 84:648-652; PCT Application No. WO 88/09810) or the blood-brain barrier (see, e.g., PCT Application No. WO 89/10134), or hybridization-triggered cleavage agents (see, e.g., Krol et al., 1988, Biotechniques, 6:958-976) or intercalating agents (see, e.g., Zon, 1988, Pharm. Res., 5:539-549). For example, the oligonucleotide can be conjugated to another molecule, e.g., a peptide, hybridization triggered cross-linking agent, transport agent, hybridization-triggered cleavage agent, etc.

[0264] Such oligonucleotides can be synthesized by standard methods known in the art, for example, by use of an automated DNA synthesizer (such as are commercially available from Biosearch, Applied Biosystems, etc.). As nonlimiting examples, phosphorothioate oligonucleotides can be synthesized by the method of Stein et al. (1988, Nucl. Acids Res., 16:3209) and methylphosphonate oligonucleotides can be prepared by use of controlled pore glass polymer supports (Sarin et al., 1988, Proc. Natl. Acad. Sci. USA, 85:7448-7451), etc.

[0265] The antisense molecules are preferably delivered to cells expressing the NF-κB pathway-associated polypeptide gene in vivo. A number of methods have been developed for delivering antisense DNA or RNA to cells; e.g., antisense molecules can be injected directly into the tissue site, or modified antisense molecules that are designed to target the desired cells (e.g., antisense linked to peptides or antibodies that specifically bind to receptors or antigens expressed on the target cell surface) can be administered systemically. Because it is often difficult to achieve intracellular concentrations of the antisense molecules that are sufficient to suppress translation of endogenous mRNAs, a particular approach utilizes a recombinant DNA construct in which the antisense oligonucleotide is placed under the control of a strong pol III or pol II promoter. The use of such a construct to transfect target cells, ex vivo, in vivo, or in vitro, will result in the transcription of sufficient amounts of single stranded RNAs that will form complementary base pairs with the endogenous NF-κB pathway-associated protein gene transcripts and thereby prevent translation of the NF-κB pathway-associated gene mRNA. For example, a vector can be introduced in vivo such that it is taken up by a cell and directs the transcription of an antisense RNA.

[0266] Ribozymes are enzymatic RNA molecules capable of catalyzing the specific cleavage of RNA (For a review, see, e.g., Rossi, J., 1994, Current Biology, 4:469-471). The mechanism of ribozyme action involves sequence-specific hybridization of the ribozyme molecule to complementary target RNA, followed by a endonucleolytic cleavage. The composition of ribozyme molecules must include one or more sequences complementary to the target gene mRNA, and must include the well known catalytic sequence responsible for mRNA cleavage. For this sequence, see U.S. Pat. No. 5,093,246, which is incorporated by reference herein in its entirety. As such, within the scope of the invention are engineered hammerhead motif ribozyme molecules that specifically and efficiently catalyze endonucleolytic cleavage of RNA sequences encoding target gene proteins. Ribozyme molecules designed to catalytically cleave NF-κB pathway-associated protein gene mRNA transcripts can also be used to prevent translation of protein gene mRNA and expression of target or pathway genes. (See, e.g., PCT Application No. WO 90/11364; and Sarver et al., 1990, Science, 247:1222-1225).

[0267] The ribozymes for use in the present invention also include RNA endoribonucleases (hereinafter referred to as “Cech-type ribozymes”) such as that which occurs naturally in Tetrahymena thermophila (known as the IVS, or L-19 IVS RNA) and which has been extensively described by Thomas Cech and collaborators (Zaug, et al., 1984, Science, 224:574-578; Zaug and Cech, 1986, Science, 231:470-475; Zaug, et al., 1986, Nature, 324:429-433; PCT Patent Application No. WO 88/04300; and Been and Cech, 1986, Cell, 47:207-216). The Cech-type ribozymes have an eight base pair active site that hybridizes to a target RNA sequence, after which cleavage of the target RNA takes place. Encompassed by the present invention are those Cech-type ribozymes that target eight base-pair active site sequences that are present in the NF-κB pathway-associated protein genes.

[0268] As in the antisense approach, ribozymes can be composed of modified oligonucleotides (e.g. for improved stability, targeting, etc.) and should be delivered to cells that express the NF-κB pathway-associated protein gene, in vivo, in vitro, or ex vivo. A preferred method of delivery involves using a DNA construct “encoding” the ribozyme under the control of a strong constitutive pol III or pol II promoter, so that transfected cells produce sufficient quantities of the ribozyme to destroy endogenous NF-κB pathway-associated protein gene messages and inhibit NF-κB pathway-associated protein mRNA translation. Because ribozymes, unlike antisense molecules, are catalytic, a lower intracellular concentration is required for efficiency.

[0269] Endogenous NF-κB pathway-associated protein gene expression can also be reduced by inactivating or “knocking out” the target and/or pathway gene or its promoter using targeted homologous recombination (see, e.g., Smithies et al., 1985, Nature317:230-234; Thomas & Capecchi, 1987, Cell, 51:503-512; and Thompson et al., 1989 Cell, 5:313-321). For example, a mutant, non-functional NF-κB pathway-associated protein gene (or a completely unrelated DNA sequence) flanked by DNA homologous to the endogenous NF-κB pathway-associated protein gene (either the coding regions or regulatory regions of the gene) can be used, with or without a selectable marker and/or a negative selectable marker, to transfect cells that express the gene in vivo. Insertion of the DNA construct, via targeted homologous recombination, results in inactivation of the NF-κB pathway-associated protein gene. Such techniques can also be utilized to generate NF-κB pathway-related disorders animal models. It should be noted that this approach can be adapted for use in humans provided that the recombinant DNA constructs are preferably directly administered or targeted to the required site in vivo using appropriate viral vectors, e.g., herpes virus vectors.

[0270] Alternatively, endogenous NF-κB pathway-associated protein gene expression can be reduced by targeting deoxyribonucleotide sequences complementary to the regulatory region of the gene (i.e., the gene promoter and/or enhancers) to form triple helical structures that prevent transcription of the gene in target cells in the body (see generally, Helene, C., 1991, Anticancer Drug Des., 6(6):569-84; Helene, C., et al., 1992, Ann. N.Y. Acad. Sci., 660:27-36; and Maher, L. J., 1992, Bioassays, 14(12):807-15). Nucleic acid molecules for use in triple helix formation to inhibit transcription should be single stranded and composed of deoxynucleotides. The base composition of these oligonucleotides should be designed to promote triple helix formation via Hoogsteen base pairing rules, which generally require that sizeable stretches of either purines or pyrimidines are present on one strand of the duplex. Nucleotide sequences can be pyrimidine-based, which will result in TAT and CGC+ triplets across the three associated strands of the resulting triple helix. The pyrimidine-rich molecules provide base complementarity to a purine-rich region of a single strand of the duplex in a parallel orientation to that strand. In addition, nucleic acid molecules can be chosen that are purine-rich, for example, containing a stretch of G residues. These molecules form a triple helix with a DNA duplex that is rich in GC pairs, in which the majority of the purine residues are located on a single strand of the targeted duplex, resulting in GGC triplets across the three strands of the triplex.

[0271] Alternatively, the potential sequences that can be targeted for triple helix formation are increased by creating a “switchback” nucleic acid molecule. Switchback molecules are synthesized in an alternating 5′-3′, 3′-5′ manner, such that they base pair with first one strand of a duplex and then with the other, eliminating the necessity for a sizeable stretch of either purines or pyrimidines to be present on one strand of the duplex.

[0272] In instances in which the antisense, ribozyme, and/or triple helix molecules described herein are utilized to inhibit mutant NF-κB pathway-associated gene expression, it is possible that the technique may so efficiently reduce or inhibit the transcription (triple helix) and/or translation (antisense, ribozyme) of mRNA produced by normal target gene alleles that the concentration of normal target gene product present may be lower than is necessary for a normal phenotype. In such cases, to ensure that substantially normal levels of NF-κB pathway-associated protein gene activity are maintained, nucleic acid molecules that encode and express NF-κB pathway-associated polypeptides exhibiting normal target gene activity can be introduced into cells via gene therapy methods that do not contain sequences susceptible to whatever antisense, ribozyme, or triple helix treatments are being utilized. In instances in which the target gene encodes an extracellular protein, it may be preferable to co-administer normal target gene protein in order to maintain the requisite level of target gene activity.

[0273] Antisense RNA and DNA, ribozyme, and triple helix molecules of the invention can be prepared by any method known in the art, e.g., methods for chemically synthesizing oligodeoxyribonucleotides and oligoribonucleotides that are practiced in the art such as solid phase phosphoramidite chemical synthesis. Alternatively, RNA molecules can be generated by in vitro and in vivo transcription of DNA sequences encoding the antisense RNA molecule. Such DNA sequences can be incorporated into a wide variety of vectors that incorporate suitable RNA polymerase promoters, such as the T7 or SP6 polymerase promoters. Alternatively, antisense cDNA constructs that synthesize antisense RNA constitutively or inducibly, depending on the promoter used, can be introduced into cell lines to form stable cell lines containing the construct.

[0274] In addition, well-known modifications to DNA molecules can be introduced into the NF-κB pathway-associated nucleic acid molecules as a means of increasing intracellular stability and half-life. Illustrative modifications include, but are not limited to, the addition of flanking sequences of ribo- or deoxyribo-nucleotides to the 5′ and/or 3′ ends of the molecule, or the use of phosphorothioate or 2′ O-methyl rather than phosphodiesterase linkages within the oligodeoxyribonucleotide backbone.

### Methods for Increasing NF-κB Pathway-Associated Protein Activity

[0275] Successful treatment of NF-κB pathway-related conditions and disorders can also be effected, where appropriate, by techniques that result in an increase in the level of NF-κB pathway-associated proteins and/or protein activity. Activity can be increased by, for example, directly increasing NF-κB pathway-associated protein activity and/or by increasing the level of gene expression. For example, modulatory compounds such as those identified through the assays and methods described above that increase NF-κB pathway-associated protein activity can be used, as appropriate, to treat NF-κB pathway-related conditions and disorders. Such molecules can include, but are not limited to peptides, including soluble peptides, and small organic or inorganic molecules, and are typically considered to be NF-κB pathway-associated protein agonists. Such a modulatory compound can be administered to a patient exhibiting NF-κB pathway-related disorders and/or symptoms at a level sufficient to treat the NF-κB pathway-related disorders and symptoms. One of skill in the art will readily know how to determine the concentration of an effective non-toxic dose of the compound using procedures routinely practiced in the art.

[0276] Alternatively, in instances in which the compound to be administered is a peptide compound, DNA sequences encoding the peptide compound, i.e., a DNA molecule, can be directly administered to a patient exhibiting a NF-κB pathway-related disorder or symptoms, at a concentration sufficient to produce a level of peptide compound sufficient to ameliorate, reduce or abolish the symptoms of the disorder. Any of the techniques described herein which provide the intracellular administration of compounds, such as, for example, liposome administration, transfection, infection, or direct injection, can be utilized for the administration of such DNA molecules. In the case of peptide compounds which act extracellularly, the DNA molecules encoding such peptides can be taken up and expressed by any cell type, so long as a sufficient circulating concentration of peptide results for the elicitation of a reduction or elimination or amelioration of NF-κB pathway-related conditions or symptoms.

[0277] In cases in which the NF-κB pathway-related disorder or condition can be localized to a particular portion or region of the body, the DNA molecules encoding such modulatory peptides can be administered as part of a delivery complex. Such a delivery complex can comprise an appropriate nucleic acid molecule and a targeting means. Such targeting means can comprise, for example, sterols, lipids, viruses or target cell specific binding agents. Viral vectors can include, but are not limited to adenovirus, adeno-associated virus, and retrovirus vectors, in addition to other materials that introduce DNA into cells, such as liposomes. In instances in which NF-κB pathway-related disorder or condition involves an aberrant NF-κB pathway-associated gene or protein, patients can be treated by gene replacement therapy. One or more copies of a normal NF-κB pathway-associated protein gene, or a portion of the gene that directs the production of a normal protein with normal protein function, can be inserted into cells by means of a delivery complex as described above. Such gene replacement techniques can be accomplished either in vivo or in vitro. Techniques which select for expression within the cell type of interest are preferred. For in vivo applications, such techniques can, for example, include appropriate local administration of NF-κB pathway-associated protein gene sequences.

[0278] Additional methods that can be used to increase the overall level of NF-κB pathway-associated polypeptide activity, in appropriate conditions in which it is advantageous to do so, include the introduction of appropriate NF-κB pathway-associated protein gene-expressing cells, preferably autologous cells, into a patient at sites and in amounts sufficient to ameliorate, reduce, or eliminate NF-κB pathway-related disorders, conditions, or symptoms. Such cells can be either recombinant or non-recombinant. Among the cell types that can be administered to increase the overall level of NF-κB pathway-associated protein gene expression in an individual are normal cells, which express the NF-κB pathway-associated protein gene. The cells can be administered at the anatomical site of expression, or as part of a tissue graft located at a different site in the body. Such cell-based gene therapy techniques are well known to those skilled in the art (see, e.g., Anderson, et al., U.S. Pat. No. 5,399,349; and Mulligan and Wilson, U.S. Pat. No. 5,460,959).

[0279] NF-κB pathway-associated protein gene sequences can also be introduced into autologous cells in vitro. Cells expressing the gene sequences can then be reintroduced, preferably by intravenous administration, into the patient until the disorder is treated and symptoms of the disorder are ameliorated, reduced, or eliminated.

### Additional Modulatory Techniques

[0280] The present invention also includes modulatory techniques which, depending on the specific application for which they are utilized, can yield either an increase or a decrease in NF-κB pathway-associated protein activity levels leading to the amelioration, reduction, or elimination of NF-κB pathway-related disorders and conditions, such as those described above.

[0281] For example, antibodies exhibiting modulatory capability can be utilized according to the methods of this invention to treat NF-κB pathway-related disorders. Depending on the specific antibody, the modulatory effect can be an increase or decrease in NF-κB pathway-associated protein activity, or in activity of a molecule regulated or modulated by the NF-κB pathway-associated protein, e.g., NF-κB. Specific antibodies can be generated using standard techniques as described above against a full-length wild type or mutant NF-κB pathway-associated polypeptide, or against peptides corresponding to portions of the protein. The antibodies include, but are not limited to, polyclonal, monoclonal, Fab fragments, single chain antibodies, chimeric antibodies, etc.

[0282] Lipofectin or liposomes can be used to deliver the antibody or an antibody fragment comprising the Fab region, which binds to epitopic regions of the NF-κB pathway-associated proteins, to cells expressing NF-κB pathway-associated proteins. Where fragments of the antibody are used, the smallest inhibitory fragment which binds to an NF-κB pathway-associated protein binding domain is preferred. For example, peptides having an amino acid sequence corresponding to the domain of the variable region of an antibody that binds to the NF-κB pathway-associated protein can be used. Such peptides can be synthesized chemically, or produced via recombinant DNA technology using methods well known in the art (e.g., see Creighton, 1983, supra and Sambrook et al., 1989, supra). Alternatively, single chain antibodies, such as neutralizing antibodies, which bind to intracellular epitopes can also be administered. Such single chain antibodies can be administered, for example, by expressing nucleotide sequences encoding single-chain antibodies within the target cell population using, for example, techniques such as those described in Marasco et al., 1993, Proc. Natl. Acad. Sci. USA, 90:7889-7893.

[0283] In another specific embodiment of the present invention, NF-κB-pathway modifiers can be combined with cytotoxic agents for the treatment of diseases including, but not limited to cancer. For example, for the treatment of NFκB diseases, inhibitors of NFκB pathway-associated peptides can be combined with cytotoxic agents such as taxol.

### Pharmaceutical Preparations and Methods of Administration

[0284] The compounds, e.g., nucleic acid sequences, proteins, polypeptides, peptides, modulators, and recombinant cells, described above can be administered to a patient, or to an individual in need thereof, in therapeutically effective doses to treat or ameliorate NF-κB pathway-related conditions and disorders. Such compounds are preferably modulators of NF-κB pathway-associated protein, such as antagonists or agonists, more preferably, obtained by methods discussed herein. A therapeutically effective dose refers to that amount of a compound or cell population sufficient to result in amelioration, reduction, elimination, or treatment of the disorder or symptoms. Alternatively, a therapeutically effective amount is that amount of a nucleic acid sequence sufficient to express a concentration of the NF-κB pathway-associated protein product which results in the amelioration of the disorder or symptoms.

[0285] Toxicity and therapeutic efficacy of compounds can be determined by standard pharmaceutical procedures in cell cultures or experimental animals, e.g., for determining the LD₅₀ (the dose lethal to 50% of the population) and the ED₅₀ (the dose therapeutically effective in 50% of the population). The dose ratio between toxic and therapeutic effects is the therapeutic index and it can be expressed as the ratio LD₅₀/ED₅₀. Compounds which exhibit large therapeutic indices are preferred. While compounds that exhibit toxic side effects can be used, care should be taken to design a delivery system that targets such compounds to the site of affected tissue in order to minimize potential damage to uninfected cells and, thereby, to reduce side effects. The data obtained from the cell culture assays and animal studies can be used in formulating a range of dosage for use in humans.

[0286] The dosage of such compounds lies preferably within a range of circulating concentrations that include the ED₅₀ with little or no toxicity. The dosage can vary within this range depending upon the dosage form employed and the route of administration utilized. For any compound used in the methods of the invention, the therapeutically effective dose can be estimated initially from cell culture assays. A dose can be formulated in animal models to achieve a circulating blood or plasma concentration range that includes the IC₅₀ (i.e., the concentration of the test compound which achieves a half-maximal inhibition of symptoms) as determined in cell culture. Such information can be used to more accurately determine useful doses in humans. Levels in plasma can be measured, for example, by high performance liquid chromatography.

[0287] Pharmaceutical compositions for use in accordance with the present invention and methods can be formulated in a conventional manner using one or more physiologically acceptable and/or pharmaceutically acceptable carriers, diluents, or excipients. Thus, therapeutic (and preventative) compounds and their physiologically acceptable salts and solvents can be formulated for administration by inhalation or insufflation (either through the mouth or the nose) or oral, buccal, parenteral or rectal administration.

[0288] For oral administration, the pharmaceutical compositions can take the form of, for example, tablets or capsules prepared by conventional means with pharmaceutically acceptable excipients such as binding agents (e.g., pre-gelatinized maize starch, polyvinylpyrrolidone or hydroxypropyl methylcellulose); fillers (e.g., lactose, microcrystalline cellulose or calcium hydrogen phosphate); lubricants (e.g., magnesium stearate, talc or silica); disintegrants (e.g., potato starch or sodium starch glycolate); or wetting agents (e.g., sodium lauryl sulfate). Tablets can be coated by methods well known in the art. Liquid preparations for oral administration can take the form of, for example, solutions, syrups or suspensions, or they can be presented as a dry product for reconstitution with water or another suitable vehicle before use. Such liquid formulations can be prepared by conventional means with pharmaceutically acceptable additives such as suspending agents (e.g., sorbitol syrup, cellulose derivatives or hydrogenated edible fats); emulsifying agents (e.g., lecithin or acacia); non-aqueous vehicles (e.g., almond oil, oily esters, ethyl alcohol or fractionated vegetable oils); and preservatives (e.g., methyl or propyl-p-hydroxybenzoates or sorbic acid). The preparations and formulations can also contain buffer salts, flavoring, coloring and sweetening agents as appropriate. Preparations for oral administration can be suitably formulated to give controlled release of the active compound. For buccal administration the compositions can take the form of tablets or lozenges formulated in conventional manner.

[0289] For administration by inhalation, the compounds for use according to the present invention are conveniently delivered in the form of an aerosol spray presentation from pressurized packs or a nebulizer, with the use of a suitable propellant, e.g., dichlorodifluoromethane, trichlorofluoromethane, dichlorotetrafluoroethane, carbon dioxide or other suitable gas. In the case of a pressurized aerosol, the dosage unit can be determined by providing a valve to deliver a metered amount. Capsules and cartridges of, for example, gelatin for use in an inhaler or insufflator can be formulated containing a powder mix of the compound and a suitable powder base such as lactose or starch.

[0290] The compounds can be formulated for parenteral administration (i.e., intravenous or intramuscular) by injection, via, for example, bolus injection or continuous infusion. Formulations for injection can be presented in unit dosage form, e.g., in ampoules or in multi-dose containers, with an added preservative. The compositions can take such forms as suspensions, solutions or emulsions in oily or aqueous vehicles, and can contain formulatory agents such as suspending, stabilizing and/or dispersing agents. Alternatively, the active ingredient can be in powder form for constitution with a suitable vehicle, e.g., sterile pyrogen-free water, before use. It is preferred that NF-κB pathway-associated protein-expressing cells be introduced into patients via intravenous administration.

[0291] The compounds can also be formulated in rectal compositions such as suppositories or retention enemas, e.g., containing conventional suppository bases such as cocoa butter or other glycerides.

[0292] In addition to the formulations described previously, the compounds can also be formulated as a depot preparation. Such long acting formulations can be administered by implantation (for example subcutaneously or intramuscularly) or by intramuscular injection. Thus, for example, the compounds can be formulated with suitable polymeric or hydrophobic materials (for example, as an emulsion in an acceptable oil) or ion exchange resins, or as sparingly soluble derivatives, for example, as a sparingly soluble salt.

[0293] The compositions can, if desired, be presented in a pack or dispenser device that can contain one or more unit dosage forms containing the active ingredient. The pack can, for example, comprise metal or plastic foil, such as a blister pack. The pack or dispenser device can be accompanied by instructions for administration.

### Animal Models

[0294] In accordance with the present invention, NF-κB pathway-associated polynucleotides (e.g. identified in Tables 1-6) can be used to generate genetically altered non-human animals or human cell lines. For example, NF-κB pathway-associated gene products can be expressed in transgenic animals, such as mice, rats, rabbits, guinea pigs, pigs, micro-pigs, sheep, goats, and non-human primates, e.g., baboons, monkeys, and chimpanzees. The term “transgenic” as used herein refers to animals expressing NF-κB pathway-associated nucleic acid sequences from a different species (e.g., mice expressing human NF-κB pathway-associated nucleic acid sequences), as well as animals that have been genetically engineered to over-express endogenous (i.e., same species) NF-κB pathway-associated nucleic acid sequences, or animals that have been genetically engineered to no longer express endogenous NF-κB pathway-associated nucleic acid sequences (i.e., “knock-out” animals), and their progeny.

[0295] Transgenic animals can be produced using techniques well known in the art, including, but not limited to, pronuclear microinjection (P. C. Hoppe and T. E. Wagner, 1989, U.S. Pat. No. 4,873,191); retrovirus mediated gene transfer into germ lines (Van der Putten et al., 1985, Proc. Natl. Acad. Sci. USA, 82: 6148-6152); gene targeting in embryonic stem cells (Thompson et al., 1989, Cell, 56: 313-321); electroporation of embryos (Lo, 1983, Mol Cell. Biol., 3: 1803-1814); and sperm-mediated gene transfer (Lavitrano et al., 1989, Cell, 57: 717-723); etc. For a review of such techniques, see Gordon, 1989, Transgenic Animals, Intl. Rev. Cytol., 115: 171-229. In addition, any technique known in the art can be used to produce transgenic animal clones containing a NF-κB pathway-associated protein transgene, for example, nuclear transfer into enucleated oocytes of nuclei from cultured embryonic, fetal or adult cells at quiescence (Campbell et al., 1996, Nature, 380: 64-66; and Wilmut et al., 1997, Nature, 385: 810-813).

[0296] Without intending to be in any way limiting, the following further embodiments are encompassed by the present invention:

### Further Embodiments

[0297] Embodiment 1: A method of diagnosing, ameliorating, treating, reducing, eliminating, and/or preventing a disease, disorder, and/or condition affected by modulation of NF-κB pathway-associated polypeptide in cells expressing the polypeptide, which comprises providing a modulator of the NF-κB pathway-associated polypeptide in an amount effective to affect the function or activity of the NF-κB pathway-associated polypeptide, and/or to affect the function or activity of NF-κB activation associated with modulated polypeptide activity or function.

[0298] The method of embodiment 1, wherein the disease, disorder, and/or condition that can be diagnosed, ameliorated, treated, reduced, eliminated, or prevented includes NF-κB pathway-related disorders and/or conditions, autoimmune disorders, disorders related to hyperimmune activity, inflammatory conditions, COPD, disorders related to aberrant acute phase responses, hypercongenital conditions, birth defects, necrotic lesions, wounds, organ transplant rejection, conditions related to organ transplant rejection, renal diseases, ischemia-reperfusion injury, heart disorders, disorders related to aberrant signal transduction, proliferation disorders, cancers, HIV infection, or HIV propagation in cells infected with other viruses, asthma, cystic fibrosis and pulmonary fibrosis.

[0299] The method of embodiment 1, wherein the modulator of NF-κB pathway-associated protein function, activity and/or interaction is an antagonist.

[0300] The method of embodiment 1, wherein the modulator of NF-κB pathway-associated protein function, activity and/or interaction is an antagonist selected from drugs, chemical compounds, proteins, peptides, antibodies, ligand compounds, small molecules, antisense complementary nucleic acid molecules, or ribozymes.

[0301] The method of embodiment 1, wherein the modulator of NF-κB pathway-associated protein function, activity and/or interaction is an NF-κB pathway-associated protein antagonist which decreases NF-κB activity.

[0302] The method of embodiment 1, wherein the modulator of NF-κB pathway-associated protein function, activity and/or interaction is an agonist.

[0303] The methods of embodiment 1, wherein the modulator of NF-κB pathway-associated protein function, activity and/or interaction is an agonist selected from drugs, chemical compounds, proteins, peptides, antibodies, ligand compounds, or small molecules.

[0304] The method of embodiment 1, wherein the modulator of NF-κB pathway-associated protein function, activity and/or interaction is an NF-κB pathway-associated protein agonist which increases NF-κB activity.

### Additional Embodiments

[0305] Embodiment 2: A method of identifying or screening for modulators of NF-κB pathway-associated polypeptides for ameliorating, treating, reducing, eliminating, or preventing NF-κB pathway-related diseases, disorders and/or conditions, comprising testing a compound to determine if the test compound modulates or affects (i) the activity and/or function of the NF-κB pathway-associated protein, (ii) the expression of the protein; and/or (iii) the interaction of the protein with an associated cell molecule in cells exposed to a harmful or deleterious extracellular stimulus.

[0306] A method of identifying or screening for modulators of the NF-κB pathway-associated protein for ameliorating, treating, reducing, eliminating, or preventing a disease, disorder and/or condition selected from autoimmune disorders, disorders related to hyperimmune activity, inflammatory conditions, disorders related to aberrant acute phase responses, hypercongenital conditions, birth defects, necrotic lesions, wounds, organ transplant rejection, conditions related to organ transplant rejection, renal diseases, ischemia-reperfusion injury, heart disorders, disorders related to aberrant signal transduction, proliferation disorders, cancers, HIV infection, or HIV propagation in cells infected with other viruses, asthma, cystic fibrosis, or pulmonary fibrosis, comprising testing a compound to determine if the test compound modulates or affects (i) the activity and/or function of the NF-κB pathway-associated polypeptide, (ii) the expression of the polypeptide, and/or (iii) the interaction of the polypeptide with an associated cell molecule in cells in which NF-κB activation is affected.

[0307] A method of identifying or screening for modulators of NF-κB pathway-associated polypeptides, wherein modulators comprise compounds and drugs functioning as agonists and antagonists, comprising combining a candidate modulator compound with a host cell expressing the polypeptides encoded by the sequences set forth in Tables 1-6; and measuring an effect of the candidate modulator compound on the activity or function of the expressed NF-κB pathway-associated polypeptide.

[0308] A method of screening for or identifying compounds that can modulate the biological activity or function of the NF-κB pathway-associated polypeptide, comprising determining the biological activity of the polypeptide in a cell expressing the polypeptide in the absence of a modulator compound; contacting the host cell expressing the NF-κB pathway-associated polypeptide with the modulator compound; and determining the biological activity or function of NF-κB pathway-associated polypeptide in the presence of the modulator compound; wherein a difference between the activity of the polypeptide in the presence of the modulator compound and in the absence of the modulator compound is indicative of a modulating effect of the compound on NF-κB pathway-associated polypeptide activity or function.

[0309] A compound which is a NF-κB pathway-associated polypeptide modulator as identified by the methods of embodiment 2, as well as compositions, including pharmaceutical compositions, comprising the modulator compound.

### Further Embodiments

[0310] An isolated polynucleotide encoding a NF-κB pathway-associated polypeptide variant of the polynucleotides set forth in Tables 1-6.

[0311] An isolated polynucleotide encoding a NF-κB pathway-associated polypeptide variant of the polypeptides set forth in Tables 1-6.

[0312] Compositions, pharmaceutical compositions, vectors and host cells comprising the variant NF-κB pathway-associated amino acid and nucleic acid sequences of these embodiments are encompassed by the invention.

[0313] A NF-κB pathway-associated protein peptide derived from the sequences set forth in Tables 1-6.

[0314] Antibodies, or fragments thereof, directed against NF-κB pathway-associated polypeptides, peptides, variants, and fragments thereof. The antibodies can be directed against all or a portion of the NF-κB pathway-associated peptides or polypeptides encoded by the sequences shown in Tables 1-6. The antibodies can be of any of the types described herein, including, for example, monoclonal, polyclonal, chimeric, and the like. Methods of utilizing the antibodies in screening assays, in diagnostic assays, as modulators, in detection assays, in purification techniques, and the like, are encompassed.

[0315] Compositions and pharmaceutical compositions comprising NF-κB pathway-associated variant polypeptides, peptides and/or antibodies are encompassed by the invention. NF-κB pathway-associated fusion polypeptides and peptides are also encompassed.

### Still Further Embodiments

[0316] An isolated nucleic acid molecule that is complementary to all or a portion of the NF-κB pathway-associated nucleic acid sequences set forth in Tables 1-6.

[0317] Compositions, pharmaceutical compositions, vectors and host cells comprising the above isolated nucleic acid molecules are encompassed. Probes and primer oligonucleotides as described in the Tables and disclosure herein are also encompassed.

[0318] A method of treating a disease, disorder, and/or condition associated with NF-κB activation, or associated with activation of a molecule mediated by NF-κB activation, comprising providing a modulator of a NF-κB pathway-associated protein in a pharmaceutically acceptable formulation, in an amount effective to modulate the expression of NF-κB pathway-associated protein. In the method the modulator is an antagonist or an agonist.

### Additional Embodiments

[0319] A method of regulating second messenger pathways and molecules therein, wherein the second messenger pathways and molecules therein are associated with a NF-κB pathway-associated disorder or disease comprising: modulating the function and/or activity of a NF-κB pathway-associated polypeptide. The method comprises regulating, modulating, or affecting the activity of the NF-κB pathway and components thereof by modulating, either by antagonizing or agonizing, the function and/or activity of an NF-κB pathway-associated polypeptide. NF-κB pathway-associated protein modulation according to the method provides treatments for diseases, disorders, and/or conditions that are mediated by NF-κB and/or other molecules related thereto. The method provides treatment, amelioration, or prevention of diseases that are caused by, or are associated with, NF-κB, the NF-κB pathway and/or its component molecules, wherein antagonist modulators of NF-κB pathway-associated proteins are preferably employed to decrease or increase the activity of NF-κB, the NF-κb pathway and/or its component molecules.

### EXAMPLES

[0320] The Examples herein are meant to exemplify the various aspects of carrying out the invention and are not intended to limit the scope of the invention in any way.

### Example 1

### Identification of NF-κB Pathway-Associated Polypeptides Utilizing Subtraction Library Technology

### Subtraction Library

### Cell Culture

[0321] For the subtraction library, duplicate flasks of THP-1 cells (10⁸) were cultured at 10⁶/ml in RPMI containing 10% heat inactivated fetal calf serum, 2 mM L-glutamine with either medium, or with BMS-205820 (2 uM) for 30 minutes at 37° C. in 5% CO₂. LPS (100 ng/ml) was added to both groups and the cells were cultured for an additional 2 hours. At the end of the incubation, cells were pelleted, washed one time with 10 ml PBS, and stored at −80° C.

### RNA Isolation

[0322] Poly A+ mRNA was isolated using the FastTrack 2.0 kit (Invitrogen, Carlsbad, Calif.) according to manufacturer's instructions.

[0323] Construction of the Subtraction Library

[0324] For first strand synthesis, Oligo d(t) Not (5′-AAGCAGTGGTAACAACGCAGAGTGCGGCCGA(T)₁₅A/G-3′) (SEQ ID NO: 677) and CapSal (5′-AAGCAGTGGTAACAACGCAGAGTCGACrGrGrG-3′) (SEQ ID NO: 678) primers were added to the RNA, and incubated for 2 minutes at 72° C., followed by 2 minutes on ice. The reaction was initiated with dNTPs and SuperScript II (Life Technologies, Baltimore, Md.). The second strand was synthesized using KlenTaq (Clontech, Palo Alto, Calif.), dNTPs, and primer (5′-AAGCAGTGGTAACAACGCAGAGTCGAC-3′ ) (SEQ ID NO: 679). The reaction was purified using a Microspin S-40010 HR column (Amersham Inc., Chicago, Ill.), and double digested with Not I and Sal I. The digested products were size fractionated using a ChromaSpin 100 column (Clontech).

[0325] The digested cDNA from the LPS group (tester) was cloned into the vector pSPORT1 precut with Not I and Sal I. The digested cDNA from the LPS plus BMS-205820 group (driver) was cloned into the pSPORT2 vector that was also cut with Not I and Sal I. The tester cDNA library in pSPORT 1 was electroporated into DH12S cells for single strand DNA isolation, and the driver cDNA library was electroporated into DH10B cells. The primary transformants were amplified in semi-solid agar.

[0326] Single stranded cDNA from the tester pSPORT1 library was rescued using M13K07 helper phage. DNA was isolated from the amplified driver pSPORT2 library using a Qiagen maxi-prep plasmid kit. The driver library was linearized using Sal I and reverse transcribed with T7 RNA polymerase, rNTPs, and biotin-16-UTP. The biotinylated RNA was treated with RNAse-free DNAse, precipitated, and purified using G-50 spin columns (Bio-Rad, Hercules, Calif.).

[0327] Prior to hybridizing the single stranded DNA with the biotinylated RNA, the poly dA region of the single stranded DNA was blocked using a d(T)-Not I oligonucleotide, dTTP nucleotides, and Taq polymerase. The single stranded cDNA was further blocked using Cot-1 DNA (Life Technologies).

[0328] For the subtractive hybridization, 600 ng of single stranded tester cDNA (poly dA, Cot-1 blocked pSPORT1) and 80 ug biotinylated driver RNA were used. The biotinylated driver RNA was incubated with hybridization buffer (40% formamide, 50 mM HEPES, 1 mM EDTA, 0.1% SDS) at 65° C. for 10 minutes, followed by 1 minute at 4° C. After this incubation, the tester cDNA was added and the sample was incubated for 24 hours at 42° C. Hybrids were removed by addition of streptavidin followed by phenol/chloroform extractions. The remaining single stranded DNA was precipitated, and used in repair reactions.

[0329] The single stranded DNA was repaired using T7 pSPORT primer, dNTPs and Precision-Taq polymerase. The repaired DNA was electroporated into DH12S cells, and then amplified to generate single stranded DNA for a second round of subtraction with the biotinylated driver RNA.

TABLE 1
Sequences that are inhibited by the NF-κB pathway

| Gene | Accession # | Seq ID Nos. |
|---|---|---|
| CLK1 | L29219 | 1 & 2 |
| Cytokine-Inducible Kinase | BC013899 | 3 & 4 |
| GPR85 | AF250237 | 5 & 6 |
| RGS16 | BC006243 | 7 & 8 |
| SDCBP | BC013254 | 9 & 10 |
| BTG1 | NM_001731 | 11 & 12 |
| JTB | NM_006694 | 13 & 14 |
| BCL2L11 | NM_006538 | 15 & 16 |
| BCL-6 | NM_001706 | 17 & 18 |
| EED | U90651 | 19 & 20 |
| similar to lysosomal amino acid | XM_058449 | 21 & 22 |
| transporter 1 | | |
| Truncated Calcium Binding Protein | NM_016175 | 23 & 24 |
| WDR4 | AJ243913 | 25 & 26 |
| FLJ22649 | NM_021928 | 27 & 28 |
| FLJ21313 | NM_023927 | 29 & 30 |
| MGC20791 | XM_046111 | 31 & 32 |
| LOC113402 | NM_145169 | 33 & 34 |
| | (XM_054209) | |
| DKFZp761I241 | AL136565 | 35 & 36 |
| DGCRK6 | AB050770 | 37 & 38 |
| TNF-Induced Protein | BC007014 | 39 & 40 |
| FLJ12120 | AK022182 | 747 & N/A |
| GSA7 | NM_006395 | 749 & 750 |
| HSPC128 | NM_014167 | 751 & 752 |
| C2GNT3 | NM_016591 | 753 & 754 |
| FLJ20512 | NM_017854 | 755 & 756 |
| FLJ11715 | NM_024564 | 757 & 758 |
| LNX | NM_032622 | 759 & 760 |
| FLJ14547 | NM_032804 | 761 & 762 |
| XBP1 | NM_005080 | 763 & 764 |
| IL23A | NM_016584 | 765 & 766 |

[0330] TABLE 2
Sequences that are induced by the NF-κB pathway

| Gene | Accession # | Seq ID Nos. |
|---|---|---|
| SGK-like protein SGKL | AF085233 | 41 & 42 |
| KIAA0794 | AB0183370 | 43 & 44 |
| KIAA0456 | AB007925 | 45 & 46 |
| ORPHAN NUCLEAR RECEPTOR TR4 | U10990 | 47 & 48 |
| SUMO-1-specific protease (SUSP1) | NM_015571 | 49 & 50 |
| SUMO-1 activating enzyme subunit 1 | NM_005500 | 51 & 52 |
| | (XM_009036) | |
| BRCA1-associated RING domain protein | U76638 | 53 & 54 |
| (BARD1) | | |
| MGC: 4079 | BC005868 | 55 & 56 |
| FLJ23390 | AK027043 | 57 & 58 |
| MGC19595 | NM_033415 | 767 & 768 |
| GLE1 | NM_001499 | 769 & 770 |
| BLVRA | NM_000712 | 771 & 772 |
| PPP1R7 | NM_002712 | 773 & 774 |
| MADH5 | NM_005903 | 775 & 776 |
| CHS1 | NM_000081 | 777 & 778 |
| ZNF304 | NM_020657 | 779 & 780 |

### Example 2

### NF-κB Pathway-Associated Protein PCR Expression Profiling

### Real Time PCR Analysis

[0331] Poly (A)⁺ mRNA was isolated from THP-1 cells that were either unstimulated, or stimulated with 100 ng/ml LPS for two hours in the presence and absence of BMS-205820 (2 uM) using the Fast Track isolation kit (Invitrogen, Carlsbad, Calif.) according to manufacturer's instructions. RNA quality and quantity were evaluated using UV spectrometry and capillary electrophoresis with the RNA 6000 Assay 10 (Agilent). First-strand cDNA was synthesized using the SuperScript™ First-Strand Synthesis System for RT-PCR (Invitrogen) according to manufacturer's instructions.

[0332] PCR reactions were performed in a total volume of 40 ul containing master mix (SYBR Green I dye, 50 mM Tris-Cl pH 8.3, 75 mM KCl, DMSO, Rox reference dye, 5 mM MgCl₂, 2 mM dNTP, 1 unit Platinum Taq High Fidelity enzyme), 0.5 uM 15 each of forward and reverse gene-specific primers, and cDNA (8 ul of a 1:36 dilution of the first strand reaction mix). For tissue expression analyses, PCR reactions included 2 ul of cDNA derived from the Human Multiple Tissue cDNA panel I and Human Immune System MTC Panel (Clontech, Palo Alto, Calif.). The amplification program consisted of a 10 minute incubation at 95° C., followed by 40 cycles of incubations at 95° C. for 15 seconds, 60° C. for 1 minute. The amplification was followed by melting curve analysis at 60° C. to determine the specificity of the amplification reaction. The data were analyzed using the TaqMan 5700 software with the threshold value set to 0.5. The message levels of GAPDH were used to normalize the amounts of cDNA for each reaction.

Gene Specific Primers

| | | Seq |
|---|---|---|
| Gene | Specific Primer | ID No. |
| CLK1F | 5′GCTGTGTCCAGATGTTGGAATG3 | 680 |
| CLK1R | 5′CAATGCAAATGTGACCATGATG3′ | 681 |
| Cytokine- | 5′GGCTCTCCTCATGCTGTTTAGTG3′ | 682 |
| Inducible | | |
| Kinase F | | |
| Cytokine- | 5′GTGGGAAGCGAGGTAAGTACAAG3′ | 683 |
| Inducible | | |
| Kinase R | | |
| GPR85F | 5′CGCTCCTTCAGGGCTAATGAT3′ | 684 |
| GPR85R | 5′GCTGTGTGGCTAGGAGGATGAG3′ | 685 |
| RGS16F | 5′GTCCCTTAGCTTGTACCTCGTAACA3′ | 686 |
| RGS16R | 5′TGGCCTTGACATGACTGCAA3′ | 687 |
| SDCBPF | 5′CCCTGCCAATCCAGCAATT3′ | 688 |
| SDCBPR | 5′GCCACACTTGCACGTATTTCTTC3′ | 689 |
| BTG1F | 5′CCAGCAGGAGGTAGCACTCAA3′ | 690 |
| BTG1R | 5′GCTGATTCGGCTGTCTACCATT3′ | 691 |
| JTBF | 5′CGCTCAGCTTTGATGGAACA3′ | 692 |
| JTBR | 5′GTCCAATTGTCGCTGACGAAT3′ | 693 |
| BCL2L11F | 5′GGCGTATCGGAGACGAGTTTAA3′ | 694 |
| BCL2L11R | 5′GGTCTTCGGCTGCTTGGTAA3′ | 695 |
| BCL-6F | 5′GCCATGCCAGTGATGTTCTTC3′ | 696 |
| BCL-6R | 5′CACGGCTCACAACAATGACAA3′ | 697 |
| EEDF | 5′CACTGACAACGTTATGTGTGGTCTT3′ | 698 |
| EEDR | 5′CGAATAGCAGCACCACATTTATGA3′ | 699 |
| Similar to | 5′CTAGGTGTGGTGGTCTGTGCTTAT3′ | 700 |
| lysosomal | | |
| amino acid | | |
| transporter 1F | | |
| Similar to | 5′CCTCCCAACTTATCCTCCAGAGTA3′ | 701 |
| lysosomal | | |
| amino acid | | |
| transporter 1R | | |
| Truncated | 5′GGCCTGACATGGAAGGTGAA3′ | 702 |
| calcium | | |
| binding | | |
| proteinF | | |
| Truncated | 5′CCCATTTAGAGGATGTGGCTGTA3′ | 703 |
| calcium | | |
| binding | | |
| proteinR | | |
| WDR4F | 5′CCGATGACAGTAAGCGTCTGATT3′ | 704 |
| WDR4R | 5′CACGGTCCTGACACTCAGACAT3′ | 705 |
| FLJ22649F | 5′GGTCTGGTGTGCCTTGTCAA3′ | 706 |
| FLJ22649R | 5′CCAGTAGTTCCCAGCCTCCAT3′ | 707 |
| FLJ21313F | 5′CCAGCCAGTACAAGGCCAATAT3′ | 708 |
| FLJ21313R | 5′CCTCCGTTGGGACACTAAGAAAC3′ | 709 |
| MGC20791F | 5′CCATCTCTTGGTTTGGTCACATC3′ | 710 |
| MCG20791R | 5′CGCAGACACTAGCCTAGAACCTATT3′ | 711 |
| LOC113402F | 5′CCATATGCAAGGGATGCAGTTAT3′ | 712 |
| LOC113402R | 5′CGTCAGTTGTTCCTGGAGTGTTT3′ | 713 |
| DKFZp761I241F | 5′GCCTCCTCTGTCTCACCCTTAA3′ | 714 |
| DKFZp761I241R | 5′GGGTGGATGGTATAGGAAGATTCA3′ | 715 |
| DGCRK6F | 5′CAGTGTAGCCCATTCTTGATCCA3′ | 716 |
| DGCRK6R | 5′GCTGCCTTTGACATCCAGAGA3′ | 717 |
| TNF-induced | 5′CCATCAGGTGGATTATACCTTTGAC3′ | 718 |
| proteinF | | |
| TNF-induced | 5′GAATGATTTGGTGCAGCATCTC3′ | 719 |
| proteinR | | |
| SGKLF | 5′CCTTGGATTCTTGGCTTAGAGTAGA3′ | 720 |
| SGKLR | 5′TGGAAGGGATGCTTGTTCTTG3′ | 721 |
| KIAA0794F | 5′CCATCTGTACTCCAGCAAAGTCA3′ | 722 |
| KIAA0794R | 5′ACTGATGAACACGTTGGCAGTT3′ | 723 |
| KIAA0456F | 5′CACACGAGCGATGACGAATG3′ | 724 |
| KIAA0456R | 5′CCCACGTAGTCAAACTTGGCA3′ | 725 |
| TR4F | 5′CTGGTGACCGGATAAAGCAAGT3′ | 726 |
| TR4R | 5′CAGTTCGCCATGCTGTTACAGA3′ | 727 |
| SUSP1F | 5′GAAGATGAACTCGTCGACTTCTCA3′ | 728 |
| SUSP1R | 5′GGAATCCATCGTCACTGCTATCA3′ | 729 |
| SUMO-1 | 5′CCTCCGACTACTTTCTCCTTCAAG3′ | 730 |
| activating | | |
| enzymeF | | |
| SUMO-1 | 5′CCCAGTGAGTCAAGCACATCA3′ | 731 |
| activating | | |
| enzymeR | | |
| BARD1F | 5′GTGAACACCACCGGGTATCAA3′ | 732 |
| BARD1R | 5′GGCTCCATAGGAAAGTAACAGCTT3′ | 733 |
| MGC:4079F | 5′GGAAGGTGGATGAGGCTACATT3′ | 734 |
| MGC:4079R | 5′TGCTTGCTGCTGCTACTGTGT3′ | 735 |
| FLJ23390F | 5′GCTGCATGTCTTCTGAATAGCAA3′ | 736 |
| FLJ23390R | 5′TCCTACGGCATACTGATCCTAGTTT3′ | 737 |
| CHS1F | 5′CCCACGCCGACCTGATTAC3′ | 781 |
| CHS1R | 5′CTAGCCCAAGGCTTGCAATAGT3′ | 782 |
| ZNF304F | 5′GGAAGGTGGATGAGGCTACATT3′ | 783 |
| ZNF304R | 5′TGCTTGCTGCTGCTACTGTGT3′ | 784 |
| MGC19595F | 5′CCACAACCATGCCAAGATGA3′ | 785 |
| MGC19595R | 5′GATGCCAGGGTTATCCAGGAA3′ | 786 |
| Gle1F | 5′GAGAACCAACCTCTGTCTGAGACTT3′ | 787 |
| Gle1R | 5′GAGCTTGCGTCAGGAGATTTG3′ | 788 |
| BLVRAF | 5′CAAGAGGTGGAGGTCGCCTATA3′ | 789 |
| BLVRAR | 5′GGTATTCCACAAGGACGTGCTT3′ | 790 |
| PPP1R7F | 5′CCACGTTCGTCAGGTTCTGA3′ | 791 |
| PPP1R7R | 5′CAGGAGCAACAGGTGGGTTAA3′ | 792 |
| MADH5F | 5′CTGTTCTTTCGGTAGCCACTGA3′ | 793 |
| MADH5R | 5′CCAGCCCAACAATCGCTTTA3′ | 794 |
| FLJ12120F | 5′CAGCCAGGCTTTCAGACATCT3′ | 795 |
| FLJ12120R | 5′GGTCCTTGGCTTAGCGCATAT3′ | 796 |
| GSA7F | 5′CTAGCAGCCCACAGATGGAGTA3′ | 797 |
| GSA7R | 5′GGTCACGGAAGCAAACAACTTC3′ | 798 |
| HSPC128F | 5′GGCTCAAACGTCACTGGAATC3′ | 799 |
| HSPC128R | 5′CAAGCAACGGCTGGTGAACT3′ | 800 |
| C2GNT3F | 5′CCAGCACAATATTTACTGCATCCA3′ | 801 |
| C2GNT3R | 5′TCATGGCAACTTTGAAGGTATCA3′ | 802 |
| FLJ20512F | 5′CATCTCCTTCATGCAGAGTGACAT3′ | 803 |
| FLJ20512R | 5′CCCAGCAGGAAGAAGCCATAT3′ | 804 |
| FLJ11715F | 5′CTACCTTACCCAGCCAGACAAGA3′ | 805 |
| FLJ11715R | 5′GAATGGCATTTCAGGAGTGTACAG3′ | 806 |
| LNXF | 5′CGGTGTGGCATATCGACATGG3′ | 807 |
| LNXR | 5′CGACGAGGTGAACACGTCTTT3′ | 808 |
| FLJ14547F | 5′GTTGCTGGCAGTGTTGTCTCA3′ | 809 |
| FLJ14547R | 5′GCTGTGATCTTCTGTGCCTTCTATC3′ | 810 |
| XBP1F | 5′GCGCTGAGGAGGAAACTGAA3′ | 811 |
| XBP1R | 5′CACTCATTCGAGCCTTCTTTCG3′ | 812 |
| Mouse Stat1F | 5′GTGGGCATCCTTCATGTGAGT3′ | 813 |
| Mouse Stat1R | 5′CCTTGGCAGAAGCTGCAGTAA3′ | 814 |
| Mouse BCL-6F | 5′CGCACAGTGACAAACCATACAA3′ | 815 |
| Mouse BCL-6R | 5′CTGCGCTCCACAAATGTTACA3′ | 816 |
| Mouse | 5′CAAGGCTCAGGAGTCCTGATCT3′ | 817 |
| MGC20791F | | |
| Mouse | 5′GCCAGGATGGTAAATGGTCATC3′ | 818 |
| MGC20791R | | |
| mGAPDHF | 5′CATGGCCTTCCGTGTTCCTA3′ | 819 |
| mGAPDHR | 5′CCTGCTTCACCACCTTCTTGA 3′ | 820 |
| IL-23 alphaF | 5′GACGCGCTGAACAGAGAGAAT3′ | 821 |
| IL-23 alphaR | 5′GCAGCAACAGCAGCATTACAG3′ | 822 |

### Example 3

### Role of Drosophila CLK1 Homolog, DOA, in NF-κB-Dependent Signaling in Drosophila S2 Cells

[0333] The Drosophila DOA (CG1658) protein is very similar to CLK1 (Table I, above) across the length of the protein and has significant homology to serine/threonine kinases of the LAMMER class (FIG. 1). Double-stranded RNA-mediated interference (RNAi) directed against DOA mRNA was used to inhibit DOA expression in Drosophila Schneider 2 (S2) cultured cells. The effect of inhibiting DOA expression on an LPS-inducible reporter was tested. LPS activates the NFκB pathway in Drosophila cells, resulting in expression of antimicrobial peptides including attacin.

[0334] A stable cell line expressing the attacin promoter linked to luciferase was treated with RNAi specific for either DOA, the Drosophila IKK-2 homolog, the Drosophila p105 homolog Relish, or the Drosophila IkB homolog cactus. The cells 15 were then stimulated with either media or LPS (FIG. 2). RNAi specific for either IKK-2 or Relish significantly inhibited reporter activation, demonstrating that the activity is dependent on NFκB. Consistent with this data, RNAi specific for the NFκB inhibitor cactus significantly upregulated promoter activity. RNAi specific for DOA significantly inhibited reporter activity, suggesting that DOA is involved an NFκB-dependent transcriptional response.

### Methods

[0335] Bioinformatic Analysis of the Phylogenetic Position of Drosophila melanogaster Darkener of Apricot (DOA) Relative to Human CDC-Like Kinase (CLK) Genes

[0336] Human protein sequences from CLK1 (gi 632964), CLK2 (gi 632968), CLK3 (gi 632972), CLK4 (9965398), an alternative CLK4 (gi 16157156), a fragment of an alternatively spliced CLK3 (gi 632570), p58clk1 (gi 284345), Drosophila DOA (gi 1706486), Arabidopsis clk gene AFC3 (gi 5915680), and human GalactosylTransferase Associated Protein Kinase (GTA, gi 1170681) were used to construct a phylogenetic tree using the parsimony method. The protein sequences were obtained from the Protein Kinase Resource (http://Ipkr.sdsc.edu). The data were first multiply aligned by Clustal W. PAUP* 4,0b10 for the Macintosh (Sinaur Associates, Sunderland, Mass.) was used to perform the phylogenetic analysis itself. FIG. 3 shows the relationship of DOA to human CLK genes.

### RNAi Analysis in S2 Stable Cell Line Expressing the Attacin Promoter-Lucificerace Construct.

[0337] A stable S2 cell line was generated with an LPS-responsive AttacinD promoter fused to a luciferase reporter. S2 cells were purchased from InVitrogen and maintained at 25° C. in complete 1×Schneider's Drosophila medium ( Cat. No. 11720-034, Invitrogen, former GIBCO BRL) supplemented with 10% heat-inactivated fetal bovine serum (Cat. No. 10100-147, Invitrogen, former GIBCO BRL), 100 units/ml of penicillin, 100 ug/ml of streptomycin (100×stock of Penicillin-Streptomycin, cat. No. 15140-148, from Invitrogen, former GIBCO BRL) and 20 mM L-Glutamine (100×L-Glutamine, cat.No. 25030-149, from Invitrogen, former GIBCO BRL). A 1.6 Kb promoter region of the attacinD AMP gene was isolated from S2 genomic DNA by PCR using the primer pair: ATGAGGCTTGGATCAGCTTT (SEQ ID NO: 738) (forward, 157904-157923 bp of AE003718 Drosophila Genome project) and CCTGAAGCCTGACATTCCAT (SEQ ID NO: 739) (reversed, 159547-159566bp of AE003718). Primers were obtained from GIBCOBRL. PCR conditions: 96° C. 4min, 94° C. 2 min, 55° C. 45 seconds, 72° C. 2 min, PCR 35 cycles. The 1.6kb attacinD PCR fragment was subcloned into a pCR2.1-TOPO vector (TOPO TA Cloning Kits, cat. No. K4500-01, Invitrogen). The attacinD promoter was subcloned from pCR2.1-TOPO vector into pGL3-Enhancer luciferase vector with restriction enzyme Sac I and Xho I(pGL3-Enhancer luciferase reporter vector, cat.no. E1771, Promega). A similar region was shown to be LPS responsive in a reporter assay (Tauszig et al., 2000). A final transfection construct, pGL3-enhancer-attacinD, was cotransfected with calcium phosphate methods with pCoHYGRO plasmid providing the hygromycin-B resistant gene as a stable selection, were used to transfect S2 cells (Inducible DES Kit, cat. No. K4120-01, Drosophila Expression System Instruction Manual,p16 from Invitrogen).

[0338] Briefly 19 ug of pGL3-enhancer-attacinD DNA was mixed with 1 ug of pCoHYGRO DNA and transfection buffer were used to transfect 6-12×10⁶ cells/3 mls/well in 6-well Falcon tissue culture plate. Stable cells were selected and maintained in complete Schneider's medium containing 300 ug/ml Hygromycin-B (Cat. R220-05, Invitrogen). Stable lines were tested for responsiveness to LPS (Han and Ip, 1999). Cells were treated with 20 ug/ml LPS ( Cat. No L-2654, Sigma) for 5 hours. Expression of luciferase was assayed with Bright-Glo™ Luciferase Assay System ( cat. No. E2620, Promega) and the luminescence signal was detected by 1450 MICROBETA Wallac Jet Liquid Scintillation & Luminescence Counter (Perkin Elmer Life Sciences).Two stable AttD-luc reporter cell lines (E4-1 and E4-9) were obtained after three rounds of limiting dilution and used for further studies.

[0339] RNAi constructs were made for DOA and control genes as follows. Complementary DNA (cDNA) clones for Drosophila genes were obtained from Research Genetics, Inc (St. Louis, Mo.). These include the cDNAs from Relish (EST GH01881), IKKB (EST LD21354), Cactus (LD18620), and DOA (LD31161) (Rubin et al., 2000). Double-stranded RNAi generation followed a modified protocol of (Hammond et al., 2000). Briefly, dsRNA was synthesized from a template amplified by PCR with T7 promoter sequences flanking the cDNA insert using the MEGAscript™ T7 High Yield Transcription Kit (cat. No. 1334, Ambion). GH01881, LD 21354, and LD31161 were in the pOT2 vector (forward primer: ACTGCAGCCGATTCATTAATG (SEQ ID NO: 740), reverse primer: GAATTAATACGACTCACTATAGGGAGATATCATACACATACGATTTAG (SEQ ID NO: 741) and LD18620 was in a pBS vector (forward primer: GAATTAATACGACTCACTATAGGGAGACATGATTACGCCAAGCTCGAA (SEQ ID NO: 742) reverse primer: TGTAAAACGACGGCCAGTGAA (SEQ ID NO: 743). dsRNA was diluted at 1:5 and denatured prior to addition to E4-1 and E4-9 cells.

[0340] Transfection of dsRNA into S2 cells was performed by adding dsRNA directly into S2 cells in serum free medium (Clemens et al., 2000). Prior to transfection, cells were split about 24 hours before transfection at 1×10⁶ cells/ml in complete 1× Schneider medium. Immediately preceding the transfection, cells were washed twice with serum free DES Expression Medium (cat. No. Q500-01, Invitrogen) and resuspended in serum free DES medium at 7×10⁵ cells/ml. 100 ul cells were added to each well in 96-well-plates (Falcon tissue culture plates), then 5 ul dsRNA/well was added, followed by vigorous shaking for 45 minutes to 1 hour, and then 150 ul complete 1×Schneider medium/well was added. 96-well-plates were wrapped with Saran wrap before incubating at 25° C. After 3 days incubation, each dsRNA treated cells were split into duplicate for the luciferase assay, and in triplicate for the proliferation assay.

[0341] 5-15 ul cells in 100 ul total volume for were used for the luciferase assay, and 30-35 ul cells in 100 ul total volume were used for the proliferation assay. Luciferase assay plates were incubated for 5 hours after adding LPS at 20 ug/ml. Proliferation assay plates were incubated for 2-3 hours before reading 490 nm Optical Density. (CellTiter 96 Aqueous One Solution Cell Proliferation Assay from Promega, Cat. No. G3580).

[0342] FIG. 4 shows the effects of RNAi on NFκB-dependent Transcription. Results represent one experiment with E4-1 cells averaged in duplicate relative to control samples. The relative luciferase activity is normalized to cell number data obtained in the proliferation assay. Similar results were obtained in 4 separate experiments and with the E4-9 stable cell line. NS is nonstimulated, LPS represents LPS treatment as described above.

### Example 4

### Identification of Addtional NF-κB Pathway-Associated Protein Sequences Following Treatment of Cells with A NF-κB Pathway Inhibitor Utilizing Microarray Technology

### Methods

### Cell culture

[0343] THP-1 cells (5×10⁶) were cultured in triplicate at 10⁶/ml in RPMI containing 10% heat inactivated fetal calf serurn, 2 mM L-glutamine with either medium, or with BMS-205820 (2 uM) for 2 hours at 37° C. in 5% CO₂. LPS (100 ng/ml) was added to both groups and the cells were cultured for an additional 2 and 8 hours. One group of triplicates was cultured for 2 and 8 hours with medium alone. At the end of the incubation, cells were pelleted, washed one time with 10 ml PBS, and stored at −80° C. The cell pellets were lysed, and RNA was isolated using the Qiagen RNeasy kit according to manufacturer's instructions.

### Probe Preparation

[0344] The RNA was treated in a total reaction volume of 100 ul with RNase Inhibitor (Invitrogen Corp., Carlsbad, Calif.), DNase I (Ambion, Houston, Tex.) for 30 minutes at 37° C. The treated RNA was purified using Qiagen RNease mini columns according to the manufacturer's instructions. For the first strand cDNA synthesis, the RNA was incubated with T7-(dT)24 primer: (5′GGCCAGTGAATTGTAATACGACTCACTATAGGGAGGCGGTTTTTTTTTT TTTTTTTTTTTTTT3′) (SEQ ID NO: 744) for 10 minutes at 70° C., followed by one minute on ice. First strand buffer, DTT, dNTP and RNase were added, and the samples incubated for 2 minutes at 45° C. Superscript II reverse transcriptase (Invitrogen Corp, Carlsbad, Calif.) was added, and the samples incubated for an additional 60 minutes at 45° C.

[0345] For the second strand synthesis, the first strand cDNA was incubated with second strand buffer, dNTPs, E. coli ligase, E. coli RNase H, E. coli Polymerase I in a total volume of 150 ul for two hours at 16° C. T4 polymerase was added, and the incubation continued for an additional 5 minutes. Following this incubation, EDTA was added, and the samples placed on ice. The cDNA samples were extracted with phenol:chloroform:isoamyl alcohol and precipitated by addition of 0.5 volumes of 7.5 M ammonium acetate and 2.5 volumes of 100% ethanol. The samples were pelleted by a 30 minute room temperature spin at 12,000×g. The pelleted samples were washed with 0.5 ml 80% ethanol, spun for 10 minutes at 12,000×g, and air dried. The samples were resuspended in 12 ul RNase free water.

[0346] The cDNA was labeled using the Enzo Bio Array High Yield RNA transcript labeling kit (Enzo Therapeutics, Farmingdale, N.Y.). The cDNA was incubated with HY reaction buffer, biotin labeled NTP, DTT, RNase mix, and T7 DNA polymerase for six hours at 37° C. Unincorporated nucleotides were removed using Qiagen RNeasy columns according to manufacturer's instructions. The cRNA was fragmented by addition of fragmentation buffer, and incubated for 35 minutes at 95° C. The fragmented cRNA (0.05 mg/ml) was added to a hybridization solution master mix that included 0.1 mg/ml herring sperm DNA, 5 nM oligo B2, 1× standard curve pool, 0.5 mg/ml acetylated BSA, 1×MES hybridization buffer.

[0347] The Affymetrix human hg-U133a and hg-U133b chips were probed with the hybridization master mix. The hybridization, washing, and Phycoerythrin streptavidin staining were performed using the Affymetrix hybridization oven and fluidics workstation according to manufacturer's instructions. Stained chips were scanned on the Affymetrix GeneChip scanner, and data was analyzed using the Affymetrix GeneChip software to determine the specifically hybridizing signal for each gene. The differentially expressed genes demonstrated at least a two-fold change in signal when comparing between samples. The differences were all statistically significant (p<0.01) when compared to controls using a T-test.

TABLE 3
Genes whose expression is repressed after 2 hours in the presence
of the NFκB inhibitor BMS-205820

| | | | | | LPS/BMS- |
|---|---|---|---|---|---|
| Gene | Accession # | Seq ID Nos. | Unstimulated | LPS | 205820 |
| CTGF | NM_001901 | 59 & 60 | 49/27 | 3104/483 | 270/78 |
| EGR3 | NM_004430 | 61 & 62 | 178/27 | 1743/66 | 456/80 |
| MINOR | U12767 | 63 & 64 | 28/13 | 2736/273 | 529/170 |
| bcl-6 | U00115 | 65 & 66 | 48/16 | 502/98 | 244/142 |
| NFIL3 | NM_005384 | 67 & 68 | 345/36 | 1313/381 | 588/116 |
| STAT4 | NM_003151 | 69 & 70 | 256/16 | 523/67 | 194/53 |
| NFE2L2 | NM_006164 | 71 & 72 | 799/299 | 4850/718 | 2624/384 |
| KLF5 | NM_001730 | 73 & 74 | 283/104 | 1333/187 | 742/107 |
| EGR2 | NM_000399 | 75 & 76 | 63/40 | 685/35 | 168/138 |
| IGFBP1 | M31159 | 77 & 78 | 184/73 | 6360/195 | 3205/330 |
| IGFBP3 | NM_000598 | 79 & 80 | 50/33 | 2698/398 | 1257/290 |
| LOC57826 | NM_021183 | 81 & 82 | 203/30 | 607/38 | 272/19 |
| PSTPIP2 | NM_024430 | 83 & 84 | 229/83 | 642/23 | 394/94 |
| GEM | NM_005261 | 85 & 86 | 104/23 | 1072/145 | 417/160 |
| PROL2 | NM_006813 | 87 & 88 | 268/124 | 1325/274 | 808/73 |
| PPP1R15A | NM_014330 | 89 & 90 | 381/129 | 3657/37 | 2090/107 |
| PTGER2 | NM_000956 | 91 & 92 | 56/49 | 458/100 | 210/106 |
| transprenyltransferase | NM_014317 | 93 & 94 | 444/85 | 2284/180 | 811/240 |
| DUSP2 | NM_004418 | 95 & 96 | 121/128 | 1323/169 | 484/22 |
| FACL2 | NM_021122 | 97 & 98 | 268/56 | 1118/66 | 457/45 |
| lipoprotein lipase | NM_000237 | 99 & 100 | 844/257 | 5045/1293 | 2378/372 |
| Usurpin-beta | AF015451 | 101 & 102 | 490/234 | 1388/123 | 739/59 |
| BTG2 | NM_006763 | 103 & 104 | 892/72 | 18481/872 | 4784/744 |
| KCNJ2 | AF153820 | 105 & 106 | 200/28 | 3534/327 | 1048/139 |
| SLC7A1 | NM_003045 | 107 & 108 | 36/44 | 124/76 | 28/10 |
| SLC2A6 | NM_017585 | 109 & 110 | 246/99 | 4286/382 | 2796/651 |
| ATP2C1 | AF225981 | 111 & 112 | 76/47 | 272/59 | 109/48 |
| ninjurin 1 | NM_004148 | 113 & 114 | 572/111 | 4156/52 | 2897/157 |
| TPD52 | NM_005079 | 115 & 116 | 186/92 | 451/60 | 198/32 |
| TNFAIP6 | NM_007115 | 117 & 118 | 42/56 | 9298/570 | 2066/45 |
| DSCR1 | NM_004414 | 119 & 120 | 237/78 | 10443/1384 | 1321/138 |
| mader | AJ011081 | 121 & 122 | 82/23 | 467/62 | 211/51 |
| hSIAH2 | U76248 | 123 & 124 | 396/172 | 1252/216 | 373/92 |
| NAV3 | NM_014903 | 125 & 126 | 160/172 | 1150/160 | 175/156 |
| FLJ23231 | NM_025079 | 127 & 128 | 207/170 | 3470/273 | 1756/72 |
| phafin 2 | NM_024613 | 129 & 130 | 274/107 | 815/71 | 429/158 |
| KIAA0346 | AB002344 | 131 & 132 | 112/34 | 1099/38 | 627/114 |
| ADAMTS1 | AF170084 | 133 & 134 | 93/32 | 196/50 | 88/65 |
| MGC: 23129 | BC015663 | 135 & 136 | 288/30 | 3955/231 | 1337/94 |
| DKFZp434M0126 | AL137384 | 137 & 138 | 58/39 | 116/14 | 19/5 |
| FLJ23342 | NM_024631 | 139 & 140 | 68/11 | 126/23 | 60/38 |
| RINZF | NM_023929 | 141 & 142 | 63/52 | 302/35 | 149/16 |
| MGC: 26709 | BC024009 | 143 & 144 | 36/5 | 1193/301 | 49/7 |

[0348] Values represent averages and standard deviations of normalized expression values for three replicates per group.

TABLE 4
Genes whose expression is repressed after 8 hours in the presence
of the NFκB inhibitor BMS-205820

| | | | | | LPS/BMS- |
|---|---|---|---|---|---|
| Gene | Accession # | Seq ID Nos. | Unstimulated | LPS | 205820 |
| CXCL13 | NM_006419 | 145 & 146 | 13/11 | 218/64 | 60/52 |
| adrenomedullin | NM_001124 | 147 & 148 | 132/58 | 440/40 | 204/8 |
| FGF4 | M17446 | 149 & 150 | 234/176 | 567/97 | 252/184 |
| I-TAC | AF030514 | 151 & 152 | 45/42 | 159/58 | 23/29 |
| SLC1A3 | NM_004172 | 153 & 154 | 312/50 | 819/157 | 480/28 |
| sorting nexin 11 | NM_013323 | 155 & 156 | 487/71 | 1718/295 | 659/70 |
| BLAME | NM_020125 | 157 & 158 | 122/80 | 1526/128 | 926/70 |
| SLC2A6 | NM_017585 | 109 & 110 | 266/57 | 4545/373 | 1386/77 |
| LY6E | NM_002346 | 161 & 162 | 212/99 | 1614/121 | 580/24 |
| WSX1 | NM_004843 | 163 & 164 | 524/93 | 1211/158 | 802/187 |
| LAMP3 | NM_014398 | 165 & 166 | 30/23 | 2803/667 | 241/99 |
| sialoadhesin | NM_023068 | 167 & 168 | 21/9 | 746/85 | 210/176 |
| PTGER4 | NM_000958 | 169 & 170 | 708/74 | 1663/168 | 833/152 |
| IL18RAP | NM_003853 | 171 & 172 | 117/79 | 617/101 | 160/146 |
| TNFRSF9 | NM_001561 | 173 & 174 | 161/60 | 967/230 | 439/33 |
| SLC5A3 | NM_006933 | 175 & 176 | 625/174 | 1526/113 | 1049/147 |
| ATP1B1 | NM_001677 | 177 & 178 | 282/66 | 1303/121 | 846/66 |
| IGSF6 | NM_005849 | 179 & 180 | 224/43 | 382/67 | 118/38 |
| MDR/TAP | NM_000593 | 181 & 182 | 633/1 | 4606/206 | 1649/308 |
| BIGMo-103 | AB040120 | 183 & 184 | 739/43 | 2505/278 | 1257/86 |
| GRM6 | NM_000843 | 185 & 186 | 276/76 | 508/154 | 270/58 |
| NRCAM | NM_005010 | 187 & 188 | 99/17 | 245/37 | 127/45 |
| SLC11A2 | NM_000617 | 159 & 160 | 76/37 | 444/94 | 126/65 |
| SLC6A8 | NM_005629 | 189 & 190 | 960/198 | 1566/400 | 572/138 |
| STEAP | NM_012449 | 191 & 192 | 108/37 | 255/52 | 66/60 |
| EPCR | NM_006404 | 193 & 194 | 118/19 | 212/21 | 85/36 |
| LILRB1 | NM_006669 | 195 & 196 | 235/133 | 753/146 | 458/175 |
| ninjurin 1 | NM_004148 | 113 & 114 | 391/75 | 2439/287 | 1673/303 |
| PDGFRL | NM_006207 | 197 & 198 | 52/39 | 244/89 | 134/62 |
| NET-6 | NM_014399 | 199 & 200 | 94/55 | 319/60 | 186/115 |
| IL10RA | NM_001558 | 201 & 202 | 411/31 | 3200/543 | 2109/13 |
| PHT2 | NM_016582 | 203 & 204 | 72/98 | 1040/278 | 632/32 |
| GPR51 | NM_005458 | 205 & 206 | 136/38 | 201/33 | 42/63 |
| FSCN1 | NM_003088 | 207 & 208 | 1229/97 | 3379/230 | 1859/50 |
| TNFSF10 | NM_003810 | 209 & 210 | 288/51 | 780/105 | 259/64 |
| BNIP3 | NM_004052 | 211 & 212 | 365/24 | 599/181 | 204/40 |
| optineurin | NM_021980 | 213 & 214 | 234/15 | 1292/23 | 444/117 |
| MGC: 12451 | BC005352 | 215 & 216 | 666/108 | 1514/87 | 555/101 |
| TNFAIP6 | NM_007115 | 117 & 118 | 70/62 | 2420/125 | 143/86 |
| TNF-induced protein | NM_014350 | 217 & 218 | 442/38 | 1364/195 | 606/128 |
| (GG2-1) | | | | | |
| IFI44 | NM_006417 | 219 & 220 | 151/27 | 2367/132 | 546/28 |
| SP110 | NM_004509 | 221 & 222 | 931/36 | 3729/110 | 1408/111 |
| MX1 | NM_002462 | 223 & 224 | 232/111 | 10689/701 | 2330/268 |
| IFI16 | NM_005531 | 225 & 226 | 259/129 | 1348/175 | 444/42 |
| IFI16b | AF208043 | 227 & 228 | 246/68 | 2376/444 | 572/11 |
| IFITM1 | NM_003641 | 229 & 230 | 423/172 | 4335/265 | 1199/108 |
| ISG15 | NM_005101 | 231 & 232 | 621/59 | 11296/154 | 3739/131 |
| RIG-I | NM_014314 | 233 & 234 | 49/31 | 1140/115 | 287/95 |
| interferon-induced | BC001356 | 235 & 236 | 816/104 | 3106/158 | 1441/269 |
| protein 35 | | | | | |
| OAS2p71 | NM_016817 | 237 & 238 | 319/128 | 3744/364 | 1205/283 |
| OAS3 | NM_006187 | 239 & 240 | 463/147 | 5780/88 | 1832/353 |
| PLSCR1 | NM_021105 | 241 & 242 | 554/38 | 3009/173 | 1284/84 |
| OAS2p69 | NM_002535 | 243 & 244 | 154/28 | 828/41 | 312/28 |
| OAS1 | NM_016816 | 245 & 246 | 69/14 | 2033/277 | 650/92 |
| OASL | NM_003733 | 247 & 248 | 217/138 | 1359/76 | 588/100 |
| tryptophanyl-tRNA | NM_004184 | 249 & 250 | 1293/88 | 4998/382 | 2565/86 |
| synthetase | | | | | |
| MX2 | NM_002463 | 251 & 252 | 580/74 | 3964/286 | 1850/227 |
| IFI27 | NM_005532 | 253 & 254 | 88/72 | 562/117 | 168/111 |
| IFIT4 | NM_001549 | 255 & 256 | 37/17 | 1174/225 | 495/53 |
| G1P3 | NM_022873 | 257 & 258 | 202/61 | 2696/429 | 1374/115 |
| TRIM34 | NM_021616 | 259 & 260 | 73/68 | 445/128 | 130/124 |
| HCK | NM_002110 | 261 & 262 | 1390/246 | 6368/634 | 3410/448 |
| UGCG | NM_003358 | 263 & 264 | 431/104 | 1894/26 | 861/41 |
| carboxypeptidase M | NM_001874 | 265 & 266 | 583/27 | 2355/436 | 774/26 |
| ALOX5AP | NM_001629 | 267 & 268 | 1901/113 | 4966/802 | 3036/324 |
| FACL2 | NM_021122 | 97 & 98 | 402/52 | 1192/186 | 527/111 |
| LYN | NM_002350 | 269 & 270 | 597/42 | 2216/253 | 1371/91 |
| CKB | NM_001823 | 271 & 272 | 510/101 | 2149/61 | 1339/101 |
| PRKR | NM_002759 | 273 & 274 | 293/39 | 1608/353 | 812/292 |
| USP18 | NM_017414 | 275 & 276 | 60/20 | 814/48 | 193/76 |
| PLA2G7 | NM_005084 | 277 & 278 | 129/40 | 413/52 | 183/76 |
| LAP3 | NM_015907 | 279 & 280 | 1268/44 | 4220/77 | 2155/134 |
| kynurenine 3- | BC005297 | 281 & 282 | 247/83 | 623/110 | 357/85 |
| hydroxylase | | | | | |
| CHST2 | NM_004267 | 283 & 284 | 125/90 | 706/90 | 333/33 |
| CYBB | NM_000397 | 285 & 286 | 158/106 | 987/49 | 504/33 |
| QPCT | NM_012413 | 287 & 288 | 70/58 | 272/9 | 120/5 |
| PDE4B | L20966 | 289 & 290 | 102/62 | 388/119 | 143/95 |
| UBE2L6 | NM_004223 | 291 & 292 | 455/94 | 2162/276 | 1116/119 |
| IL1BCE | U13699 | 293 & 294 | 275/209 | 898/86 | 354/85 |
| ADAMDEC1 | NM_014479 | 295 & 296 | 101/65 | 502/41 | 251/27 |
| PPM1B2 | AJ271832 | 297 & 298 | 50/43 | 172/35 | 77/30 |
| C1GALT1 | NM_020156 | 299 & 300 | 117/66 | 270/95 | 121/28 |
| ME1 | NM_002395 | 301 & 302 | 267/86 | 1896/370 | 1297/195 |
| PDE4D2 | AF012074 | 303 & 304 | 56/44 | 150/50 | 87/14 |
| spermidine/spermine | M55580 | 305 & 306 | 459/69 | 2948/177 | 1713/333 |
| N1-acetyltransferase | | | | | |
| ARSB | NM_000046 | 307 & 308 | 121/49 | 405/109 | 271/51 |
| sphingosine-1- | AF144638 | 309 & 310 | 145/125 | 404/88 | 240/85 |
| phosphate lyase | | | | | |
| ADAM28 | NM_021777 | 311 & 312 | 44/34 | 131/44 | 75/17 |
| acyl-coenzyme A: | L21934 | 313 & 314 | 69/63 | 219/64 | 96/74 |
| cholesterol | | | | | |
| acyltransferase | | | | | |
| SPPH1 | NM_030791 | 315 & 316 | 44/39 | 142/35 | 78/48 |
| TNIP1 | NM_006058 | 317 & 318 | 703/40 | 5250/152 | 1739/268 |
| SAMSN1 | NM_02213 | 319 & 320 | 98/85 | 557/36 | 185/74 |
| | (NM_02213) | | | | |
| pleckstrin | NM_002664 | 321 & 322 | 1810/134 | 6332/1336 | 3571/197 |
| cyclin E2 splice | AF112857 | 323 & 324 | 227/22 | 503/124 | 240/59 |
| variant 1 | | | | | |
| IFNGR2 | NM_005534 | 325 & 326 | 2395/127 | 9461/365 | 6318/957 |
| PSTPIP2 | NM_024430 | 83 & 84 | 296/120 | 1029/182 | 411/76 |
| calgranulin A | NM_002964 | 327 & 328 | 6170/863 | 19314/2121 | 3722/444 |
| calgranulin B | NM_002965 | 329 & 330 | 2483/215 | 9522/742 | 2000/100 |
| cyclin-E binding | NM_016323 | 331 & 332 | 191/81 | 745/127 | 306/25 |
| protein 1 | (NM_01632) | | | | |
| calgranulin C | NM_005621 | 333 & 334 | 275/59 | 1028/83 | 377/146 |
| HPAST | AF001434 | 335 & 336 | 402/146 | 2909/451 | 773/54 |
| RGS13 | AF030107 | 337 & 338 | 19/23 | 104/29 | 39/29 |
| SCHIP1 | NM_014575 | 339 & 340 | 48/34 | 136/58 | 44/15 |
| CKIP-1 | NM_016274 | 341 & 342 | 289/153 | 2075/310 | 1221/175 |
| ARHE | NM_005168 | 343 & 344 | 94/90 | 834/135 | 546/38 |
| BRDG1 | NM_012108 | 345 & 346 | 59/40 | 212/28 | 58/43 |
| RGL | AF186779 | 347 & 348 | 139/85 | 1675/194 | 1141/165 |
| Sp110b | AF280094 | 349 & 350 | 731/138 | 4588/393 | 1369/47 |
| ISGF-3 | M97935 | 351 & 352 | 686/24 | 3257/176 | 987/56 |
| CREBL2 | NM_001310 | 353 & 354 | 191/59 | 525/65 | 196/47 |
| IRF7 | NM_004030 | 355 & 356 | 378/30 | 3295/413 | 1366/202 |
| NFE2L2 | NM_006164 | 71 & 72 | 826/167 | 3105/304 | 1389/236 |
| MTF1 | NM_005955 | 357 & 358 | 678/82 | 2407/174 | 1173/204 |
| TFEC | NM_012252 | 359 & 360 | 657/67 | 1596/305 | 826/193 |
| STAT4 | NM_003151 | 361 & 362 | 222/46 | 981/127 | 228/15 |
| STAT2 | NM_005419 | 363 & 364 | 300/50 | 876/220 | 428/40 |
| musculin | NM_005098 | 365 & 366 | 148/53 | 1133/162 | 468/90 |
| CTNND1 | AF062328 | 367 & 368 | 315/60 | 902/158 | 500/120 |
| H-plk | NM_015852 | 369 & 370 | 169/26 | 281/19 | 93/36 |
| ATF5 | NM_012068 | 371 & 372 | 1001/151 | 3757/333 | 2513/31 |
| AP-2 alpha | NM_003220 | 373 & 374 | 193/135 | 613/37 | 166/14 |
| c-maf | AF055376 | 375 & 376 | 35/31 | 181/73 | 88/43 |
| TR2 | M21985 | 377 & 378 | 69/36 | 218/43 | 100/75 |
| NFE2L3 | NM_004289 | 379 & 380 | 180/57 | 505/150 | 206/29 |
| ORC5T | AF081459 | 381 & 382 | 165/85 | 259/27 | 130/43 |
| MGC:2268 | BC000080 | 383 & 384 | 39/19 | 811/103 | 85/19 |
| BST2 | NM_004335 | 385 & 386 | 1168/122 | 3885/427 | 1885/122 |
| cig5 | AF026941 | 387 & 388 | 61/56 | 543/71 | 113/34 |
| FEZ1 | NM_005103 | 389 & 390 | 178/52 | 2575/127 | 1079/158 |
| Pirin | NM_003662 | 391 & 392 | 155/70 | 562/61 | 291/17 |
| G0S2 | NM_015714 | 393 & 394 | 475/111 | 1235/256 | 688/134 |
| HSPA6 | NM_002155 | 395 & 396 | 323/184 | 1023/275 | 281/211 |
| MGC:13087 | BC006141 | 397 & 398 | 96/67 | 357/57 | 186/8 |
| HIG2 | NM_013332 | 399 & 400 | 790/39 | 1459/138 | 421/120 |
| protease inhibitor 15 | NM_015886 | 401 & 402 | 88/79 | 268/42 | 84/20 |
| SCO2 | NM_005138 | 403 & 404 | 799/129 | 2014/483 | 1193/163 |
| MDA5 | NM_022168 | 405 & 406 | 187/80 | 784/161 | 413/69 |
| PROL2 | NM_006813 | 87 & 88 | 402/94 | 890/140 | 389/188 |
| MGC:12814 | BC006101 | 407 & 408 | 75/44 | 705/42 | 327/71 |
| AD7C-NTP | NM_014486 | 409 & 410 | 150/23 | 373/96 | 178/78 |
| TFPI | NM_006287 | 411 & 412 | 40/27 | 148/6 | 28/32 |
| TTY1 | AF000990 | 413 & 414 | 119/15 | 308/21 | 209/70 |
| FKSG18 | AF317129 | 415 & 416 | 480/83 | 1294/262 | 645/260 |
| FGL2 | NM_006682 | 417 & 418 | 81/93 | 535/191 | 311/25 |
| laforin | BC005286 | 419 & 420 | 86/74 | 267/47 | 96/48 |
| MGC:10978 | BC004395 | 421 & 422 | 134/122 | 475/79 | 241/152 |
| SUPAR | AY029180 | 423 & 424 | 500/118 | 3118/344 | 2105/298 |
| gp130-RAPS | AB015706 | 425 & 426 | 101/58 | 243/65 | 150/25 |
| DBCCR1 | NM_014618 | 427 & 428 | 19/7 | 163/41 | 63/70 |
| CRIM1 | NM_016441 | 429 & 430 | 36/47 | 370/102 | 174/77 |
| MGC:4655 | BC004908 | 431 & 432 | 1229/35 | 3256/517 | 1692/137 |
| FLJ23231 | NM_025079 | 127 & 128 | 209/66 | 1466/38 | 498/122 |
| FLJ12806 | NM_022831 | 433 & 434 | 201/60 | 360/18 | 194/71 |
| FLJ10134 | NM_018004 | 435 & 436 | 420/12 | 1761/322 | 802/50 |
| UXS1 | NM_025076 | 437 & 438 | 810/61 | 3147/132 | 1551/218 |
| FLJ22341 | NM_024599 | 439 & 440 | 171/98 | 530/129 | 276/55 |
| NAV3 | NM_014903 | 125 & 126 | 811/146 | 2176/246 | 482/77 |
| FLJ00048 | AK024456 | 441 & 442 | 139/79 | 473/129 | 311/18 |
| IMAGE:4128465 | BC007843 | 443 | 1056/88 | 4314/987 | 2023/272 |
| MGC:9246 | BC009699 | 444 & 445 | 6313/536 | 14679/2127 | 5196/641 |
| Oligodendrocyte | AK091462 | 446 & 447 | 162/44 | 793/40 | 320/150 |
| lineage transcription | | | | | |
| factor 2 | | | | | |
| FLJ23535 | AK027188 | 448 & 449 | 324/74 | 2409/58 | 768/124 |
| neutrophil cytosolic | BC002816 | 450 & 451 | 630/28 | 4612/235 | 3418/58 |
| factor 1 | | | | | |
| FLJ11259 | NM_018370 | 452 & 453 | 340/115 | 1634/76 | 479/160 |
| KIAA0084 | D42043 | 454 & 455 | 631/22 | 1711/177 | 660/119 |
| FLJ20637 | NM_017912 | 456 & 457 | 142/162 | 886/112 | 218/91 |
| FLJ37747 | AK095066 | 458 | 184/16 | 402/48 | 210/38 |
| KIAA0937 | AB023154 | 459 & 460 | 242/82 | 2065/564 | 540/98 |
| FLJ21175 | AK024828 | 461 & 462 | 207/48 | 637/70 | 136/104 |
| HSPC177 | NM_016410 | 463 & 464 | 624/177 | 1847/70 | 806/256 |
| FLJ23094 | AK026747 | 465 & 466 | 404/226 | 2434/192 | 796/85 |
| FLJ13054 | AK023116 | 467 & 468 | 369/26 | 858/214 | 425/58 |
| FLJ22693 | NM_022750 | 469 & 470 | 488/54 | 2037/266 | 800/64 |
| KIAA0856 | AB020663 | 471 & 472 | 302/59 | 1072/102 | 323/167 |
| PRO2870 | AF130080 | 473 & 474 | 364/115 | 1879/448 | 691/233 |
| MGC5347 | NM_024063 | 475 & 476 | 245/38 | 482/43 | 223/123 |
| KIAA0984 | AB023201 | 477 & 478 | 186/65 | 340/22 | 75/19 |
| FLJ10901 | NM_018265 | 479 & 480 | 889/139 | 2586/309 | 1261/248 |
| FLJ13397 | NM_024948 | 481 & 482 | 46/34 | 244/74 | 50/27 |
| FLJ20035 | NM_017631 | 483 & 484 | 158/62 | 538/151 | 248/57 |
| KIAA0286 | AB006624 | 485 & 486 | 158/12 | 417/124 | 236/15 |
| KIAA0247 | NM_014734 | 487 & 488 | 732/87 | 2473/484 | 1326/299 |
| cyld | AJ250014 | 489 & 490 | 333/87 | 1383/112 | 864/254 |
| FLJ11286 | NM_018381 | 491 & 492 | 393/42 | 1714/376 | 998/303 |
| FLJ20073 | NM_017654 | 493 & 494 | 106/11 | 417/74 | 254/91 |
| FLJ10111 | NM_017999 | 495 & 496 | 145/34 | 461/93 | 305/48 |
| UXS1 | NM_025076 | 437 & 438 | 810/61 | 3147/132 | 1551/218 |
| PLAC8 | NM_016619 | 497 & 498 | 8906/420 | 12175/736 | 2981/61 |
| KIAA0987 | NM_012307 | 499 & 500 | 58/83 | 293/42 | 102/43 |
| FLJ20234 | BC000795 | 501 & 502 | 219/87 | 497/172 | 157/8 |
| FLJ10849 | NM_018243 | 503 & 504 | 160/60 | 290/87 | 122/16 |
| DKFZp434F0318 | NM_030817 | 505 & 506 | 68/35 | 141/15 | 43/27 |
| FLJ22800 | NM_024795 | 507 & 508 | 61/68 | 162/32 | 69/43 |
| KIAA0805 | AB018348 | 509 & 510 | 75/48 | 314/39 | 143/100 |
| MGC11335 | NM_030819 | 511 & 512 | 141/27 | 291/79 | 117/101 |
| FLJ20651 | NM_017919 | 513 & 514 | 94/69 | 287/104 | 127/106 |
| FLJ13105 | NM_025001 | 515 & 516 | 79/44 | 197/62 | 112/42 |
| KIAA1005 | AB023222 | 517 & 518 | 29/4 | 116/50 | 40/16 |
| FLJ23191 | NM_024574 | 519 & 520 | 160/44 | 313/91 | 141/95 |
| KIAA0671 | AB014571 | 521 & 522 | 171/148 | 340/93 | 121/33 |
| FLJ23231 | NM_025079 | 127 & 128 | 209/66 | 1466/141 | 498/122 |
| IMAGE:4718024 | BC022281 | 523 & 524 | 187/37 | 1321/236 | 452/92 |
| FLJ00055 | AK024462 | 525 & 526 | 250/11 | 1204/129 | 623/22 |
| IMAGE:4447884 | BC020595 | 527 & 528 | 355/32 | 1170/141 | 701/65 |
| DKFZp586C091 | AL050119 | 529 | 103/66 | 268/93 | 147/14 |
| FLJ40021 | AK097340 | 530 & 531 | 15/19 | 102/27 | 13/8 |
| FLJ36863 | AK094182 | 532 | 100/37 | 161/15 | 19/12 |
| MGC:4637 | BC005879 | 533 & 534 | 200/46 | 294/65 | 83/68 |
| STAT1 | NM_139266 | 823 & 748 | 244/136 | 4092/654 | 1066/221 |

[0349] Values represent averages and standard deviations of normnalized expression values for three replicates per group.

TABLE 5
Genes whose expression is induced after 2 hours in the presence
of the NFκB inhibitor BMS-205820

| | | | | | LPS/BMS- |
|---|---|---|---|---|---|
| Gene | Accession # | Seq ID Nos. | Unstimulated | LPs | 205820 |
| ID2 | NM_002166 | 535 & 536 | 2218/168 | 711/171 | 2004/558 |
| MEF2D | NM_005920 | 537 & 538 | 906/91 | 366/30 | 708/120 |
| retinoic acid receptor, | NM_000964 | 539 & 540 | 752/152 | 174/76 | 539/137 |
| alpha | | | | | |
| RUNX3 | NM_004350 | 541 & 542 | 1887/326 | 592/123 | 1203/41 |
| CALIFp | AF180476 | 543 & 544 | 570/24 | 217/29 | 405/69 |
| MAFB | NM_005461 | 545 & 546 | 226/73 | 379/102 | 516/88 |
| RREB1 | NM_002955 | 547 & 548 | 1134/216 | 460/106 | 966/84 |
| beta-glucocorticoid | X03348 | 549 & 550 | 278/86 | 132/66 | 300/80 |
| receptor | | | | | |
| HEX gene | Z21533 | 551 & 552 | 191/79 | 48/31 | 132/5 |
| LTBP3 | NM_021070 | 553 & 554 | 132/60 | 37/45 | 180/48 |
| TXNIP | NM_006472 | 555 & 556 | 9899/1323 | 2560/322 | 5187/987 |
| Similar to LIM domain | BC003096 | 557 & 558 | 431/140 | 238/134 | 721/57 |
| protein | | | | | |
| SQSTM1 | NM_003900 | 559 & 560 | 1330/36 | 3229/760 | 4869/460 |
| RGS12 | AF030110 | 561 & 562 | 272/39 | 15/10 | 305/94 |
| SH3GL1 | NM_003025 | 563 & 564 | 1205/143 | 416/284 | 964/105 |
| type II cAMP- | M90360 | 565 & 566 | 242/40 | 123/79 | 341/63 |
| dependent protein | | | | | |
| kinase | | | | | |
| TESK1 | NM_006285 | 567 & 568 | 474/124 | 132/73 | 329/85 |
| PRDX2 | NM_005809 | 569 & 570 | 368/20 | 146/27 | 377/63 |
| NADPH-cytochrome | AF258341 | 571 & 572 | 379/85 | 152/78 | 377/88 |
| P450 reductase | | | | | |
| CYP1A2 | NM_000761 | 573 & 574 | 194/31 | 69/39 | 284/140 |
| kallikrein 13 | NM_015596 | 575 & 576 | 272/59 | 145/14 | 310/56 |
| LCAT-like | AB017494 | 577 & 578 | 316/51 | 141/50 | 248/9 |
| lysophospholipase | | | | | |
| histidyl-tRNA | U18937 | 579 & 580 | 752/114 | 306/11 | 593/127 |
| synthetase homolog | | | | | |
| CCR1 | NM_001295 | 581 & 582 | 1433/194 | 264/55 | 1128/55 |
| TNFRSF1A | NM_001065 | 583 & 584 | 1976/224 | 546/137 | 1557/186 |
| P2Y5 | NM_005767 | 585 & 586 | 179/14 | 89/16 | 201/42 |
| SLC17A5 | NM_012434 | 587 & 588 | 1630/40 | 785/140 | 2058/403 |
| KCNN4 | NM_002250 | 589 & 590 | 1559/259 | 609/122 | 2542/246 |
| TNFSF14 | NM_003807 | 591 & 592 | 794/111 | 378/120 | 1232/198 |
| SFD alpha | AF112204 | 593 & 594 | 920/170 | 422/8 | 629/168 |
| thromboxane A2 | D38081 | 595 & 596 | 317/36 | 130/41 | 313/32 |
| receptor | | | | | |
| GABRR1 | NM_002042 | 597 & 598 | 137/39 | 36/6 | 183/49 |
| adenosine A3 receptor | NM_000677 | 599 & 600 | 230/85 | 59/43 | 165/26 |
| integrin, alpha 5 | NM_002205 | 601 & 602 | 3492/266 | 1720/289 | 4459/171 |
| sodium bicarbonate | AF069510 | 603 & 604 | 341/35 | 95/72 | 224/73 |
| cotransporter | | | | | |
| amelogenin | NM_001142 | 605 & 606 | 146/21 | 42/9 | 160/80 |
| HEC | NM_006101 | 607 & 608 | 370/65 | 154/35 | 311/22 |
| ALTE | NM_004729 | 609 & 610 | 912/205 | 300/156 | 572/80 |
| HCG II | X81001 | 611 | 423/34 | 168/178 | 388/44 |
| MAD1L1 | NM_003550 | 612 & 613 | 540/60 | 159/15 | 442/125 |
| MAP1B | NM_005909 | 614 & 615 | 97/16 | 37/51 | 148/23 |
| pelota homolog | NM_015946 | 616 & 617 | 326/46 | 177/73 | 341/101 |
| ICB-1 | NM_004848 | 618 & 619 | 646/82 | 196/106 | 529/186 |
| Similar to CAP-binding | BC022786 | 620 & 621 | 1042/47 | 399/44 | 709/85 |
| protein complex | | | | | |
| interacting protein 2 | | | | | |
| IMAGE:3939659 | BC012778 | 622 & 623 | 720/71 | 234/35 | 706/100 |
| FLJ00216 | AK074143 | 624 & 625 | 822/132 | 367/105 | 777/83 |
| TRIP-Br2 | NM_014755 | 626 & 627 | 585/99 | 255/69 | 692/80 |
| FLJ13479 | NM_024706 | 628 & 629 | 248/43 | 42/44 | 194/48 |
| KIAA0241 | D87682 | 630 & 631 | 517/136 | 290/75 | 552/10 |
| MGC5338 | NM_024062 | 632 & 633 | 276/81 | 63/43 | 211/27 |
| KIAA0349 | AB002347 | 634 & 635 | 256/92 | 113/63 | 284/39 |
| PRO1048 | NM_018497 | 636 & 637 | 124/12 | 34/26 | 190/41 |
| clone 161455 | U66046 | 638 | 177/61 | 91/20 | 217/15 |
| MGC:33567 | BC038297 | 639 & 640 | 856/241 | 326/29 | 724/167 |
| MGC:23591 | BC015781 | 641 & 642 | 210/38 | 84/64 | 258/38 |
| C20orf172 | NM_024918 | 643 & 644 | 236/63 | 116/2 | 264/56 |
| DKFZp667O2416 | AL512765 | 645 & 646 | 320/70 | 157/38 | 370/56 |
| ZFP64 | NM_018197 | 647 & 648 | 280/3 | 98/53 | 194/50 |
| FUS glycine rich | X71428 | 649 & 650 | 123/34 | 69/12 | 166/41 |
| protein | | | | | |
| FLJ23420 | NM_025061 | 651 & 652 | 129/50 | 12/7 | 146/84 |
| MGC:13138 | BC008821 | 653 & 654 | 244/22 | 117/60 | 297/81 |
| FLJ13119 | NM_024580 | 655 & 656 | 443/48 | 159/22 | 278/39 |
| DKFZP564O0823 | NM_015393 | 657 & 658 | 339/73 | 158/64 | 354/123 |

[0350] Values represent averages and standard deviations of normalized expression values for three replicates per group.

TABLE 6
Genes whose expression is induced after 8 hours in the presence
of the the NFκB inhibitor BMS-205820

| | | | | | LPS/BMS- |
|---|---|---|---|---|---|
| Gene | Accession # | Seq ID Nos. | Unstimulated | LPs | 205820 |
| MRG1 | AF109161 | 659 & 660 | 1470/186 | 695/86 | 1514/164 |
| RNF24 | NM_007219 | 661 & 662 | 1111/114 | 427/22 | 870/46 |
| PEX6 | NM_000287 | 663 & 664 | 284/25 | 154/157 | 377/109 |
| GLUT3 | M20681 | 665 & 666 | 110/47 | 36/21 | 184/8 |
| mitochondrial solute | AF155660 | 667 & 668 | 275/14 | 105/87 | 201/30 |
| carrier | | | | | |
| CDK5 | NM_004935 | 669 & 670 | 588/102 | 270/140 | 615/206 |
| synaptojanin 2 | AF318616 | 671 & 672 | 234/110 | 52/20 | 215/56 |
| lysophospholipase-like, | BC006230 | 673 & 674 | 397/71 | 1414/38 | 1981/395 |
| IRS2 | NM_003749 | 675 & 676 | 2614/198 | 900/143 | 1448/554 |

[0351] Values represent averages and standard deviations of normalized expression values for three replicates per group.

### Example 5

### Method of Confirming the Functional Relevance of the NF-κB Pathway-Associated Polynuceotides and Polypeptides to the NFκB Pathway Through the Application of Antisense Oligonucleotide Methodology

[0352] Human microvascular endothelial cells (HMVEC, Clonetics, Walkersville, Md.) were plated in 48 well tissue culture plates at 30,000 cells per well and cultured overnight in EGM-2 medium (Clonetics) at 37° C. in 5% CO₂. The next morning, the cells were transfected with 25 nM oligomer and 0.75 ug/ml lipofectamine 2000 (Invitrogen). Following an overnight culture with oligomers, the cells were stimulated with 10 ng/ml TNFα for 6 hrs and analyzed for E-selecting expression by ELISA. Expression was normalized to cell number. Antisense oligomers selective for NF-κB target genes BCL-6 and DGCRK6 significantly inhibited TNFα-induced E-selecting expression. This inhibition was equivalent to, or greater than that achieved using antisense oligomers specific for IKK-2. These data suggest that BCL-6 and DGCRK6 are functionally linked to an NF-κB dependent response.

### Example 6

### Method of Determining Alteration in a Gene Corresponding to the NF-κB Pathway-Associated Polynucleotides

[0353] RNA isolated from entire families or individual patients presenting with a phenotype of interest (such as a disease) is isolated. cDNA is then generated from these RNA samples using protocols known in the art. (See, e.g., J. Sambrook et al., Molecular Cloning: A Laboratory Manual, Cold Spring Harbor Laboratory, Cold Spring Harbor, N.Y., 1989). The cDNA is used as a template for PCR, employing primers surrounding the regions of interest in (SEQ ID NOS: 1, 3, 5, 7, 9, 11, 13, 15, 17, 19, 21, 23, 25, 27, 29, 31, 33, 35, 37, 39, 41, 43, 45, 47, 49, 51, 53, 55, 57, 59, 61, 63, 65, 67, 69, 71, 73, 75, 77, 79, 81, 83, 85, 87, 89, 91, 93, 95, 97, 99, 101, 103, 105, 107, 109, 111, 113, 115, 117, 119, 121, 123, 125, 127, 129, 131, 133, 135, 137, 139, 141, 143, 145, 147, 149, 151, 153, 155, 157, 159, 161, 163, 165, 167, 169, 171, 173, 175, 177, 179, 181, 183, 185, 187, 189, 191, 193, 195, 197, 199, 201, 203, 205, 207, 209, 211, 213, 215, 217, 219, 221, 223, 225, 227, 229, 231, 233, 235, 237, 239, 241, 243, 245, 247, 249, 251, 253, 255, 257, 259, 261, 263, 265, 267, 269, 271, 273, 275, 277, 279, 281, 283, 285, 287, 289, 291, 293, 295, 297, 299, 301, 303, 305, 307, 309, 311, 313, 315, 317, 319, 321, 323, 325, 327, 329, 331, 333, 335, 337, 339, 341, 343, 345, 347, 349, 351, 353, 355, 357, 359, 361, 363, 365, 367, 369, 371, 373, 375, 377, 379, 381, 383, 385, 387, 389, 391, 393, 395, 397, 399, 401, 403, 405, 407, 409, 411, 413, 415, 417, 419, 421, 423, 425, 427, 429, 431, 433, 435, 437, 439, 441, 443, 444, 446, 448, 450, 452, 454, 456, 458, 459, 461, 463, 465, 467, 469, 471, 473, 475, 477, 479, 481, 483, 485, 487, 489, 491, 493, 495, 497, 499, 501, 503, 505, 507, 509, 511, 513, 515, 517, 519, 521, 523, 525, 527, 529, 530, 532, 533, 535, 537, 539, 541, 543, 545, 547, 549, 551, 553, 555, 557, 559, 561, 563, 565, 567, 569, 571, 573, 575, 577, 579, 581, 583, 585, 587, 589, 591, 593, 595, 597, 599, 601, 603, 605, 607, 609, 611, 612, 614, 616, 618, 620, 622, 624, 626, 628, 630, 632, 634, 636, 638, 639, 641, 643, 645, 647, 649, 651, 653, 655, 657, 659, 661, 663, 665, 667, 669, 671, 673, 675, 747, 749, 751, 753, 755, 757, 759, 761, 763, 765, 767, 769, 771, 773, 775, 777, 779 & 823).

[0354] Suggested PCR conditions consist of 35 cycles at 95° C. for 30 seconds; 60-120 seconds at 52° C.-58° C.; and 60-120 seconds at 70° C., using buffer solutions described, for example, in Sidransky et al., 1991, Science, 252:706.

[0355] PCR products are then sequenced using primers labeled at their 5′ end with T4 polynucleotide kinase, employing SequiTherm Polymerase. (Epicentre Technologies, Madison, Wis.). The intron-exon borders of selected exons is also determined and genomic PCR products analyzed to confirm the results. PCR products harboring suspected mutations are then cloned and sequenced to validate the results of the direct sequencing. PCR products are cloned into T-tailed vectors as described in Holton et al., 1991, Nucleic Acids Research, 19:1156 and are sequenced with T7 polymerase (United States Biochemical). Affected individuals are identified by mutations not present in unaffected individuals.

[0356] Genomic rearrangements also serve as a method of determining alterations in a gene corresponding to a polynucleotide. Genomic clones are nick-translated with digoxigenindeoxy-uridine 5′-triphosphate (Boehringer Manheim), and FISH is performed as described in Johnson et al., 191, Methods Cell Biol., 35:73-99. Hybridization with the labeled probe is carried out using a vast excess of human cot-1 DNA for specific hybridization to the corresponding genomic locus. Chromosomes are counter stained with 4,6-diamino-2-phenylidole and propidium iodide, producing a combination of C- and R-bands. Aligned images for precise mapping are obtained using a triple-band filter set (Chroma Technology, Brattleboro, Vt.) in combination with a cooled charge-coupled device camera (Photometrics, Tucson, Ariz.) and variable excitation wavelength filters. (Johnson et al., 1991, Genet. Anal. Tech. Appl., 8:75). Image collection, analysis and chromosomal fractional length measurements are performed using the ISee Graphical Program System. (Inovision Corporation, Durham, N.C.) Chromosome alterations of the genomic region hybridized by the probe are identified as insertions, deletions, and translocations. These alterations are used as diagnostic markers for an associated disease.

### Example 7

### Alternative Methods of Detecting Polymophisms in the NF-κB Pathway-Associated Polynucleotides

[0357] Preparation of Samples: Polymorphisms are detected in a target nucleic acid from an individual being analyzed. To assay genomic DNA, virtually any biological sample (other than pure red blood cells) is suitable. For example, convenient tissue samples include whole blood, semen, saliva, tears, urine, fecal material, sweat, buccal, skin and hair. To assay cDNA or mRNA , the tissue sample must be obtained from an organ in which the target nucleic acid is expressed. For example, if the target nucleic acid is a cytochrome P450, the liver is a suitable source.

[0358] Many of the methods described below require amplification of DNA from target samples. This can be accomplished by methods known in the art, particularly, for example, PCR. See generally, PCR Technology: Principles and Applications for DNA Amplification, (ed.) H. A. Erlich, Freeman Press, New York, N.Y., 1992; PCR Protocols: A Guide to Methods and Applications (eds.) Innis, et al., Academic Press, San Diego, Calif., 1990); Mattila et al., 1991, Nucleic Acids Res., 19: 4967; Eckert et al., 1991, PCR Methods and Applications 1; PCR (eds.) McPherson et al., IRL Press, Oxford; and U.S. Pat. No. 4,683,202. Other suitable amplification methods include the ligase chain reaction (LCR) (See, e.g., Wu and Wallace, 1989, Genomics, 4:560; Landegren et al., 1988, Science, 241:1077); transcription amplification (Kwoh et al., 1989, Proc. Natl. Acad Sci. USA, 86:1173); self-sustained sequence replication (Guatelli et al., 1990, Proc. Nat. Acad Sci. USA, 87:1874); and nucleic acid based sequence amplification (NASBA). The latter two amplification methods involve isothermal reactions based on isothermal transcription, which produce both single stranded RNA (ssRNA) and double stranded DNA (dsDNA) as the amplification products in a ratio of about 30 or 100 to 1, respectively. Additional methods of amplification are known in the art or are described elsewhere herein.

[0359] Detection of Polymorphisms in Target DNA: There are two distinct types of analyses of target DNA for detecting polymorphisms. The first type of analysis, sometimes referred to as de novo characterization, is carried out to identify polymorphic sites not previously characterized (i.e., to identify new polymorphisms). This analysis compares target sequences in different individuals with identify points of variation, i.e., polymorphic sites. By analyzing groups of individuals representing the greatest ethnic diversity among humans, and the greatest breed and species variety in plants and animals, patterns characteristic of the most common alleles/haplotypes of the locus can be identified, and the frequencies of such alleles/haplotypes in the population can be determined. Additional allelic frequencies can be determined for subpopulations characterized by criteria such as geography, race, or gender. The de novo identification of polymorphisms of the invention is described further herein.

[0360] The second type of analysis determines which form(s) of a characterized (known) polymorphism are present in individuals undergoing testing. Additional methods of analysis are known in the art or are described elsewhere herein.

[0361] Allele-Specific Probes: The design and use of allele-specific probes for analyzing polymorphisms is described, for example, by Saiki et al., 1986, Nature, 324:163-166; Dattagupta, EP 235,726; and Saiki, WO 89/11548. Allele-specific probes can be designed that hybridize to a segment of target DNA from one individual but do not hybridize to the corresponding segment from another individual due to the presence of different polymorphic forms in the respective segments from the two individuals. Hybridization conditions should be sufficiently stringent that there is a significant difference in hybridization intensity between alleles, and preferably an essentially binary response, in which a probe hybridizes to only one of the alleles. Some probes are designed to hybridize to a segment of target DNA such that the polymorphic site aligns with a central position (e.g., in a 15-mer at the 7 position; in a 16-mer, at either the 8 or 9 position) of the probe. This type of probe design achieves good discrimination in hybridization between different allelic forms. Allele-specific probes are often used in pairs, with one member of the pair showing a perfect match to a reference form of a target sequence and the other member showing a perfect match to a variant form. Several pairs of probes can then be immobilized on the same support for simultaneous analysis of multiple polymorphisms within the same target sequence.

[0362] Tiling Arrays: Polymorphisms can also be identified by hybridization to nucleic acid arrays, some examples of which are described in WO 95/11995. The same arrays, or different arrays, can be used for the analysis of characterized polymorphisms. WO 95/11995 also describes sub-arrays that are optimized for the detection of a variant form of a pre-characterized polymorphism. Such a sub-array contains probes designed to be complementary to a second reference sequence, which is an allelic variant of the first reference sequence. The second group of probes is designed by the same principles as described, except that the probes exhibit complementarity to the second reference sequence. The inclusion of a second group (or further groups) can be particularly useful for analyzing short subsequences of the primary reference sequence in which multiple mutations are expected to occur within a short distance commensurate with the length of the probes (e.g., two or more mutations within 9 to 20 or more bases).

[0363] Allele-Specific Primers: An allele-specific primer hybridizes to a site on target DNA overlapping a polymorphism and only primes the amplification of an allelic form to which the primer exhibits perfect complementarity. See, e.g., Gibbs, 1989, Nucleic Acid Res., 17:2427-2448. An allele-specific primer is used in conjunction with a second primer which hybridizes at a distal site. Amplification proceeds from the two primers, resulting in a detectable product which indicates that the particular allelic form is present. A control is usually performed with a second pair of primers, one of which shows a single base mismatch at the polymorphic site, and the other of which exhibits perfect complementarity to a distal site. The single-base mismatch prevents amplification and no detectable product is formed. The method works best when the mismatch is included in the 3′-most position of the oligonucleotide aligned with the polymorphism because this position is most destabilizing elongation from the primer (see, e.g., WO 93/22456).

[0364] Direct-Sequencing: The direct analysis of the sequence of NF-κB pathway-associated polynucleotides polymorphisms according to this invention can be accomplished using either the dideoxy chain termination method, or the Maxam—Gilbert method (see, e.g., J. Sambrook et al., Molecular Cloning, A Laboratory Manual (2nd Ed., CSHP, New York 1989); and Zyskind et al., 1988, Recombinant DNA Laboratory Manual, (Acad. Press).

[0365] Denaturing Gradient Gel Electrophoresis: Amplification products generated using the polymerase chain reaction can be analyzed by the use of denaturing gradient gel electrophoresis. Different alleles can be identified based on the different sequence-dependent melting properties and the electrophoretic migration of DNA in solution. (e.g., Chapter 7, PCR Technology. Principles and Applications for DNA Amplification, (ed.) Erlich, W.H. Freeman and Co, New York, 1992).

[0366] Single-Strand Conformation Polymorphism Analysis: Alleles of target sequences can be differentiated using single-strand conformation polymorphism analysis, which identifies base differences by alteration in electrophoretic migration of single stranded PCR products, as described in Orita et al., 1989, Proc. Nat. Acad. Sci. USA, 86:2766-2770. Amplified PCR products can be generated as described above, and heated or otherwise denatured, to form single stranded amplification products. Single-stranded nucleic acids may refold or form secondary structures which are partially dependent on the base sequence. The different electrophoretic mobilities of single-stranded amplification products can be related to base-sequence differences between alleles of target sequences.

[0367] Single Base Extension: An alternative method for identifying and analyzing polymorphisms is based on single-base extension (SBE) of a fluorescently-labeled primer coupled with fluorescence resonance energy transfer (FRET) between the label of the added base and the label of the primer. Typically, the method, such as that described by Chen et al., 1997, Proc. Natl. Acad. Sci. USA, 94:10756-61, uses a locus-specific oligonucleotide primer labeled on the 5′ terminus with 5-carboxyfluorescein (F AM). This labeled primer is designed so that the 3′ end is immediately adjacent to the polymorphic site of interest. The labeled primer is hybridized to the locus, and single base extension of the labeled primer is performed with fluorescently-labeled dideoxyribonucleotides (ddNTPs) in dye-terminator sequencing fashion. An increase in fluorescence of the added ddNTP in response to excitation at the wavelength of the labeled primer is used to infer the identity of the added nucleotide.

### Example 8

### Method of Genotyping Each NF-κB Pathway-Associated Polynucleotide SNP

[0368] Genomic DNA preparation: Genomic DNA samples for genotyping are prepared using the Purigene™ DNA extraction kit from Gentra Systems (Gentra Systems, Inc., Minneapolis, Minn.). After preparation, DNA samples are diluted to a 2 ng/ul working concentration with TE buffer (10 mM Tris-Cl, pH 8.0, 0.1 mM EDTA, pH 8.0) and stored in 1 ml 96 deep-well plates (VWR) at −20° C. until use. Samples for genomic DNA preparation may be obtained from the Coriell Institute (Collingswood, N.J.), patients participating in a Bristol-Myers Squibb (BMS) clinical study, from other sources known in the art, or as otherwise described herein.

[0369] Genotyping: SNP genotyping reactions are performed using the SNPStream™ system (Orchid Biosience, Princeton, N.J.) based on genetic bit analysis (T. Nikiforov et al., 1994, Nucl. Acids Res., 22:4167-4175). The regions including 5polymorphic sites are amplified by PCR using a pair of primers (OPERON Technologies), one of which can be phosphorothioated. 6 μl of a PCR cocktail containing 1.0 ng/μl of genomic DNA, 200 μM dNTPs, 0.5 μM forward PCR primer, 0.5 μM reverse PCR primer (phosphorothioated), 0.05 U/μl Platinum Taq DNA polymerase (LifeTechnologies), and 1.5 mM MgCl₂. The PCR primer pairs used for genotyping analysis can be designed using methods known in the art in conjunction with the teachings described herein.

[0370] PCR reactions are set up in 384-well plates (MJ Research) using a MiniTrak liquid handling station (Packard Bioscience). PCR thermocycling can be performed under the following conditions in a MJ Research Tetrad machine: step1, 95 degrees for 2 min; step 2, 94 degrees for 30 min; step 3, 55 degrees for 2 min; step 4, 72 degrees for 30 sec; step 5, go back to step 2 for an additional 39 cycles; step 6, 72 degrees for 1 min; and step 7, 12 degrees indefinitely. After thermocycling, the amplified samples are placed in the SNPStream™ (Orchid Bioscience) machine, and the automated genetic bit analysis (GBA) reaction (T. Nikiforov et al., Ibid.) is performed. The first step of this reaction involves degradation of one of the strands of the PCR products by T7 gene 6 exonuclease to yield single-stranded products. The strand containing phosphorothioated primer is resistant to T7 gene 6 nuclease, and is not degraded by this enzyme. After digestion, the single-stranded PCR products are subjected to an annealing step in which the single stranded PCR products are annealed to the GBA primer on a solid phase, and then subjected to the GBA reaction (single base extension) using dideoxy-NTPs labeled with biotin or fluorescein. The GBA primers are designed using methods known in the art, in conjunction with the teachings of the present invention.

[0371] The present invention encompasses the substitution of certain polynucleotides within the GBA primers with a polynucleotide that can be substituted with a C3 linker (C3 spacer phosphoramidite) during synthesis of the primer. Such linkers can be obtained from Research Genetics; Sigma-Genosys; or Operon, for example. Incorporation of the dideoxynucleotides into a GBA primer is detected by use of a two color ELISA assay using anti-fluorescein alkaline phosphatase conjugate and anti-biotin horseradish peroxidase antibodies. Automated genotype calls are made by GenoPak software (Orchid Bioscience). Manual correction of automated calls can be performed upon inspection of the resulting allelogram of each SNP.

### Example 9

### Alternative Method of Genotypying NF-κB Pathway-Associated Polynucleotides SNPs

[0372] In addition to the method of genotyping described herein above, the skilled artisan can determine the genotype of the NF-κB pathway-associated polynucleotides polymorphisms of the present invention using the below described alternative method. This method is referred to as the “GBS method” herein and can be performed as described in conjunction with the teachings as described elsewhere herein.

[0373] Briefly, the direct analysis of the sequence of NF-κB pathway-associated polynucleotides polymorphisms of the present invention is accomplished by DNA sequencing of PCR products corresponding to the same PCR amplicons that are designed to be in close proximity to the polymorphisms of the present invention using the Primer3 program. The M13_{—SEQUENCE}1 “tgtaaaacgacggccagt”, (SEQ ID NO: 745), is prepended to each forward PCR primer. The M13_SEQUENCE2 “caggaaacagctatgacc”, (SEQ ID NO: 746), is prepended to each reverse PCR primer. Each forward and reverse primer is based upon the coding region of the region flanking the SNP and is designed such that the SNP is amplified.

[0374] PCR amplification can be performed on genomic DNA samples amplified from (20 ng) in reactions (50 μl) containing 10 mM Tris-Cl pH 8.3, 50 mM KCl, 2.5 mM MgCl₂, 150 μM dNTPs, 3 μM PCR primers, and 3.75 U TaqGold DNA polymerase (PE Biosystems). PCR can be performed in MJ Research Tetrad machines under a set of cycling conditions comprising 94° C., 10 minutes, 30 cycles of 94° C., 30 seconds, 60° C., 30 seconds, and 72° C., 30 seconds, followed by 72° C., 7 minutes. PCR products are purified using QIAquick PCR purification kit (Qiagen) and are sequenced by the dye-terminator method using PRISM 3700 automated DNA sequencer (Applied Biosystems, Foster City, Calif.) following the manufacturer's instruction outlined in the Owner's Manual, which is hereby incorporated herein by reference in its entirety. PCR products are sequenced by the dye-terminator method using the M13_SEQUENCE1 (SEQ ID NO: 745) and M13_SEQUENCE2 (SEQ ID NO: 746) primers as described above. The genotype can be determined by analysis of the sequencing results at the polymorphic position.

### Example 10

### Additional Methods of Genotyping NF-κB Pathway-Associated Polynucleotides SNPs

[0375] The skilled practitioner appreciates that there are a number of methods suitable for genotyping a SNP of the present invention, aside from the preferred methods described herein. The present invention encompasses the following non-limiting types of genotype assays: PCR-free genotyping methods; Single-step homogeneous methods; Homogeneous detection with fluorescence polarization; Pyrosequencing; “Tag” based DNA chip system; Bead-based methods; fluorescent dye chemistry; Mass spectrometry based genotyping assays; TaqMan genotype assays; Invader genotype assays; and microfluidic genotype assays, among others. Also encompassed by the present invention are the following, non-limiting genotyping methods: U. Landegren et al., 1998, Genome Res. 8:769-776; P. Kwok, 2000, Pharmacogenomics, 1:95-100; I. Gut, 2001, Hum Mutat., 17:475-492; D. Whitcombe et al., 1998, Curr. Opin. Biotechnol., 9:602-608; S. Tillib and A. Mirzabekov, 2001, Curr. Opin. Biotechnol., 12:53-58; E. Winzeler et al., 1998, Science, 281:1194-1197; V. Lyamichev et al., 1999, Nat. Biotechnol., 17:292-296; J. Hall et al., 2000, Proc. Natl. Acad. Sci. USA, 97:8272-8277; C. Mein et al., 2000, Genome Res., 10:333-343; Y. Ohnishi et al., 2001, J. Hum. Genet., 46: 471-477; M. Nilsson et al., 1994, Science, 265:2085-2088; J. Baner et al., 1998, Nucleic Acids Res., 26: 5073-5078; J. Baner et al., 2001, Curr. Opin. Biotechnol., 12:11-15; A. Hatch et al., 1999, Genet. Anal., 15:35-40; P. Lizardi et al., 1998, Nat. Genet., 19(3):225-232; X. Zhong et al., 2001, Proc. Natl. Acad Sci. USA, 98:3940-3945; F. Faruqi et al., 2001, BMC Genomics 2, 4; K. Livak, 1999, Genet. Anal., 14:143-149; S. Marras et al., 1999, Genet. Anal., 14:151-156; K. Ranade et al., 2001, Genome Res., 11:1262-1268; M. Myakishev et al., 2001, Genome Res., 11:163-169; L. Beaudet et al., 2001, Genome Res., 11:600-608; X. Chen et al., 1999, Genome Res., 9:492-498; N. Gibson et al., 1997, Clin. Chem., 43:1336-1341; S. Latif et al., 2001, Genome Res., 11: 436-440; T. Hsu et al., 2001, Clin. Chem., 47:1373-1377; A. Alderbom et al., 2000, Genome Res., 10:1249-1258; M. Ronaghi et al., 1998, Science, 281:363, 365; M. Ronaghi, 2001, Genome Res., 11:3-11; A. Pease et al., 1994, Proc. Natl. Acad. Sci. USA, 91:5022-5026; E. Southern et al., 1993, Genomics, 13:1008-1017; D. Wang et al., 1998, Science, 280:1077-1082; P. Brown and D. Botstein, 1999, Nat. Genet., 21:33-37; M. Cargill et al., 1999, Nat. Genet., 22:231-238; S. Dong et al., 2001, Genome Res., 11:1418-1424; M. Halushka et al., 1999, Nat. Genet., 22:239-247; J. Hacia, 1999, Nat. Genet., 21:42-47; R. Lipshutz et al., 1999, Nat. Genet., 21:20-24; R. Sapolsky et al., 1999, Genet. Anal., 14:187-192; Z. Tsuchihashi and P. Brown, 1994, J. Virol., 68:5863; D. Herschlag, 1995, J. Biol. Chem., 270:20871-20874; S. Head et al., 1997, Nucleic Acids Res., 25:5065-5071; T. Nikiforov et al., 1994, Nucleic Acids Res., 22:4167-4175; A. Syvanen et al., 1992, Genomics, 12:590-595; J. Shumaker et al., 1996, Hum Mutat, 7:346-354; K. Lindroos et al., 2001, Nucleic Acids Res., 29:E69-9; K. Lindblad-Toh et al., 2000, Nat. Genet., 24:381-386; T. Pastinen et al., 2000, Genome Res., 10:1031-1042; J. Fan et al., 2000, Genome Res, 10:853-860; J. Hirschhorn et al., 2000, Proc. Natl. Acad Sci. USA, 97:12164-12169; A. Bouchie, 2001, Nature Biotechnol., 19:704; M. Hensel et al., 1995, Science, 269:400-403; D. Shoemaker et al., 1996, Nature Genet., 14:450-456; N. Gerry et al., 1999, J. Mol. Biol., 292:251-262; D. Ladner et al., 2001, Lab. Invest., 81:1079-1086; M. Iannone et al., 2000, Cytometry, 39:131-140; R. Fulton et al., 1997, J. Clin. Chem., 43:1749-1756; B. Armstrong et al., 2000, Cytometry, 40:102-108 H. Cai et al., 2000, Genomics, 69:395; J. Chen et al., 2000, Genome Res., 10:549-557; F. Ye et al., 2001, Hum Mutat., 17:305-316; K. Michael et al., 1998, Anal. Chem., 70:1242-1248; F. Steemers et al., 2000, Nature Biotechnol., 18:91-94;W. Chan and S. Nie, 1998, Science, 281:2016-2018; M. Han et al., 2001, Nature Biotechnol., 19:631-635; T. Griffin and L. Smith, 2000, Trends Biotechnol., 18:77-84; P. Jackson et al., 2000, Mol. Med. Today, 6:271-276; L. Haff and I. Smirnov, 1997, Genome Res., 7:378-388; P. Ross et al., 1998, Nat. Biotechnol., 16:1347-1351; M. Bray et al., 2001, Hum. Mutat., 17:296-304; S. Sauer et al., 2000, Nucleic Acids Res., 28:E13; S. Sauer et al., 2000, Nucleic Acids Res., 28:E100; X. Sun et al., 2000, Nucleic Acids Res., 28:E68; K. Tang et al., 1999, Proc. Natl. Acad. Sci. USA, 91:10016-10020; J. Li et al., 1999, Electrophoresis, 20:1258-1265; D. Little et al., 1997, Nat. Med., 3:1413-1416; D. Little et al., 1997, Anal. Chem., 69:4540-4546; T. Griffin et al. 1997, Nat. Biotechnol., 15:1368-1372; P. Ross et al., 1997, Anal. Chem., 69:4197-4202; P. Jiang-Baucom et al., 1997, Anal. Chem., 69:4894-4898; T. Griffin et al., 1999, Proc. Natl. Acad Sci USA, 96:6301-6306; M. Kokoris et al., 2000, Mol. Diagnos., 5:329-340; C. Jurinke et al., 2001, Methods Mol. Biol., 200:170:103-16; and/or N. Taranenko et al., 1996, Genet. Anal., 13:87-94.

### Example 11

### Use of Other NF-κB Inhibitors and NF-κB Knock-Out Cell Lines to Confirm the Regulation of Selected Target Genes

### TaqMan Analyses

[0376] PolyA+ mRNA was isolated from THP1 cells that were either unstimulated, stimulated with LPS for 2 hours, or stimulated with LPS for 2 hours in the presence of the peptide BMS-205820 (2 μM). In some experiments, THP-1 cells were stimulated with LPS in the presence of the glucocorticoid dexamethasone (100 nM), and the IKK-2 inhibitor, BMS-345541 (10 μM). RNA quality and quantity were evaluated using UV spectrometry and capillary electrophoresis with the RNA 6000 Assay by Agilent. Five-hundred nanograms of polyA RNA was used for first-strand cDNA synthesis using the SuperScript™ First-Strand Synthesis System for RT-PCR (Life Technologies) following the manufacturer's instructions with 250 ng of random hexamers.

[0377] For the NF-κB knockout studies, wild type 3T3 cells, 3T3 fusions of embryonic fibroblasts derived from p65 and IκBα knockouts, or embryonic fibroblasts derived from p50 and RelB knockouts were stimulated for 2 and 8 hours with 10 ng/ml TNFα or 10 ng/ml PMA. RNA isolation and cDNA synthesis were performed as described above.

[0378] PCR Reactions were performed in a total volume of 40 μl. The master mix contained SYBR Green I Dye, 50 mM Tris-HCl pH8.3, 75 mM KCl, DMSO, Rox reference dye, 5 mM MgCl₂, 2 mM dNTP, Platinum Taq High Fidelity (1U/reaction), and 0.5 μM of each primer. The cDNA was diluted 1:36 from the synthesis reaction and eight microliters was used in each PCR reaction. For tissue distribution analyses, two microliters of cDNA from the Human Multiple Tissue and Human Immune System MTC cDNA panels were used as templates. The amplification program consisted of a 10 minute incubation at 95° C. followed by forty cycles of incubations at 95° C. for 15 seconds and 60° C. for 1 minute. Amplification was followed by melting curve analysis at 60° C. to demonstrate that the amplification was specific to a single amplicon. A negative control without cDNA template was run to assess the overall specificity.

[0379] A relative value for the initial target concentration in each reaction was determined using the TaqMan 5700 software. The threshold value was set to 0.5 to obtain cycle threshold values that were used to assign relative message levels for each target. The message levels of GAPDH were determined for each cDNA sample and were used to normalize all other genes tested from the same cDNA sample.

### Results

[0380] To further confirm the regulation of selected target genes, we used other inhibitors of the NF-κB activation pathway. Although it has other transcriptional effects, dexamethasone inhibits NF-κB activity via glucocorticoid receptor-mediated transrepression (Reichardt et al. (2001) EMBO J. 20:7168-7173). BMS-345541 is a selective IKK-2 inhibitor (BMS patent, Burke et al. (2003) J. Biol. Chem. 278:1450-1456). Induction of Cytokine-Inducible Kinase (CNK) expression was detected by 1 hour post stimulation and peaked at 2 hours (FIG. 5A). At all time points, addition of BMS-345541 potently inhibited expression of CNK. In contrast, addition of dexamethasone induced CNK mRNA levels above that detected with LPS stimulation alone.

[0381] Expression of BCL-2 Like 11 was modestly induced by LPS with levels peaking between 2 and 4 hours post stimulation (FIG. 5B). Addition of BMS-345541 significantly inhibited expression at each time point below that detected in resting cells. Addition of dexamethasone significantly increased BCL-2 like 11 expression above that detected in LPS stimulated cells alone.

[0382] Expression of BCL-6 peaked between 2 and 4 hours post stimulation (FIG. 5C). Similar to the other target genes, addition of BMS-345541 significantly inhibited the expression of BCL-6. Addition of dexamethasone failed to inhibit BCL-6 expression. At the 2 hour time point, dexamethasone significantly upregulated BCL-6 expression above that detected in LPS stimulated cells alone. Since dexamethasone is a glucocorticoid receptor agonist, some of these genes may contain glucocorticoid response elements in their promoters that override the effects of transrepression (Hofmann et al. (2002) Biol. Chem. 383:1947-1951).

[0383] Expression of MGC20791 was maximal by 2 hours post stimulation and remained high through 8 hours (FIG. 5D). Dexamethasone failed to inhibit LPS-mediated induction of MGC20791 mRNA. Addition of BMS-345541 significantly inhibited MGC20791 expression at all time points examined.

[0384] Expression of Stat1 mRNA did not significantly increase until 8 hours post stimulation (FIG. 5E). At this time point, both dexamethasone and BMS-345541 significantly inhibited Stat1 expression.

[0385] To confirm the NF-κB-dependent expression of selected target genes, we profiled their expression in mouse embryonic fibroblasts derived from germline knockouts of different NF-κB family members. Wild type 3T3 cells, and embryonic fibroblasts derived from germline knockouts of p65, RelB, p50, and IκBα were stimulated for 2 or 8 hours with either TNFα or PMA. At each time point, mRNA was isolated and real time PCR was performed. Stat1 expression was not induced in response to either TNFα or PMA (FIG. 6A). However, expression was superinduced in fibroblast lines deficient in IκBα, a negative regulator of NF-κB activity. This suggests that Stat1 expression can be regulated by NF-κB activity.

[0386] Expression of the mouse homologue of MGC20791 was induced in wild type fibroblasts in response to TNFα (FIG. 6B). No induction was observed in fibroblasts deficient for either p65 or RelB. However, TNFα-dependent expression was observed in fibroblasts deficient for p50, suggesting that NF-κB complexes containing p65 and RelB, but not p50, are required for MGC20791 induction.

[0387] High constitutive expression of BCL-6 was detected in wild type fibroblasts (FIG. 6C). No induction was observed in response to TNFα. Similar levels of expression were observed in fibroblasts deficient for p65 expression. However, significantly lower levels of mRNA were detected in fibroblasts derived from p50 knockout animals. These data suggest that NF-κB complexes containing p50 contribute to BCL-6 expression.

### Example 12

### Methods of Confirming the Associating of the MGC20791 Target to the NF-κB Pathway

### Reporter Assays

[0388] A549 cells were stably transfected with an NF-κB-luciferase reporter construct. The stable cell line was plated (10,000 cells/well) in 96 well white plates (Hewlett Packard) and transiently transfected using Lipofectamine 2000 (Invitrogen) with either the pcDNA3.1 vector (Invitrogen) or pcDNA3.1 containing the full length MGC20791 coding sequence and a FLAG® epitope tag. After an overnight culture, the complexes were removed, and cells were stimulated with either medium (RPMI without phenol red containing 10% FCS and glutamax), 10 ng/ml TNFα, 10 ng/ml IL-1β, or with 10 ng/ml PMA and 1 μg/ml ionomycin. After a 6 hour stimulation, luciferase substrate was added (Promega), and the signal was read on a Topcount (Hewlett Packard)—see FIG. 7A.

[0389] In some experiments, the A549 stable cell line containing the NF-κB reporter construct was transiently transfected as described above with siRNAs (100 nM, Sequitur) specific for either MGC20791, NF-κB p65, or a control sequence (see FIG. 8A). The cells were stimulated exactly as described above.

### siRNA Studies

[0390] To confirm knockdown of MGC20791 protein by siRNA reagents, Cos-7 cells were plated in 6-well plates at 300,000 cells/well. The cells were transfected with pcDNA3.1 encoding the FLAG®-tagged complete MGC20791 coding sequence. The cells were co-transfected with either control or MGC20791-specific siRNA duplexes (Sequitur, 100 nM). Following an overnight culture, the cells were harvested, lysed in buffer, and analyzed by Western blot with anti-FLAG® (Sigma) and anti-actin (Santa Cruz) antibodies (see FIG. 7B).

### Huvec Cytokine Assays

[0391] HUVECs were obtained from Clonetics (Cambrex, Walkersville, Md.). The cells were plated in 48-well plates (30,000 cells/well) in EG-2 media (Cambrex) and cultured overnight. The cells were transfected using Lipofectamine 2000 with siRNA duplexes specific for either MGC20791, NF-κB p65, Stat1, or control sequences. After an overnight culture, the duplexes were removed and the cells were stimulated with 10 ng/ml TNFα. Following a 6-hour stimulation, supernatants were removed for ELISA analyses. The cells were cultured with media and MTS reagent (Promega) for an additional two hours to measure cell viability. Concentrations of IL-6 and IL-8 in the supernatants were measured by ELISA (BD Pharmingen). Values were normalized to cell viability using the MTS results (see FIG. 8B).

### Results

[0392] One of the NF-κB associated polypeptide of the present invention that was isolated from the subtraction library described herein, MGC20791 (NM_{—}052864) has recently been described as a novel TRAF2 binding protein involved in TNF and IL-1 signaling pathways (Kanamori et al. (2002) Bioch. Biophys. Res. Comm. 290:1108-1113; Takatsuna et al. (2003) J. Biol. Chem. 278:12144-12150; Matsuda et al. (2003) Oncogene 22:3307-3318). Similar to these reports, the inventors observed an increase in NF-κB-dependent transcriptional activity when MGC20791 was overexpressed in an A549 cell line containing a stably integrated NF-κB reporter construct (see FIG. 7A). Overexpression of MGC20791 did not significantly affect the responses to either TNFα or IL-1β. However, PMA/Ionomycin-induced activation of NF-κB was significantly increased when MGC20791 was overexpressed.

[0393] Consistent with the published reports, and the above experiment, partial knockdown of MGC20791 protein using siRNA (see FIG. 7B) decreased TNFα-induced and PMA/Ionomycin-induced NF-κB activation in the A549 stable reporter line (see FIG. 8A). Protein knockdown had no effect on IL-1β-dependent activity.

[0394] To examine the role of MGC20791 in a more physiologic NF-κB-dependent response, the inventors tested the effect of MGC20791 knockdown on TNFα-induced MCP-1 production by human umbilical vein endothelial cells (HUVECs, see FIG. 8B). Transfection of HUVECs with siRNA specific for MGC20791 significantly inhibited TNFα-dependent MCP-1 secretion. The inhibition seen was similar to that achieved by knocking down either the p65 subunit of NF-κB or the transcription factor Stat1. Both transcription factors are known to be required for MCP-1 production. In summary, these experiments suggest that the NF-κB target polypeptide MGC20791 functions in NF-κB dependent responses and therefore could represent an important therapeutic target for the treatment of inflammatory diseases.

[0395] It will be clear that the invention may be practiced otherwise than as particularly described in the foregoing description and examples. Numerous modifications and variations of the present invention are possible in light of the above teachings and, therefore, are within the scope of the appended claims.

[0396] The entire disclosure of each document cited (including patents, patent applications, journal articles, abstracts, laboratory manuals, books, or other disclosures) in the Background of the Invention, Detailed Description, and Examples is hereby incorporated herein by reference. Further, the hard copy of the Sequence Listing submitted herewith and the corresponding computer readable form are both incorporated herein by reference in their entireties.

### BRIEF DESCRIPTION OF THE SEQUENCE LISTING

[0397] Incorporated herein by reference in its entirety is a Sequence Listing, including SEQ ID NO: 1 through SEQ ID NO:823. The Sequence Listing is contained on a compact disc, i.e., CD-ROM, three identical copies of which are filed herewith. The Sequence Listing, in IBM/PC MS-DOS format (named “D0284.NP.ST25.txt”), PatentIn Version 3.2, was recorded on Jan. 13, 2004, and is 2,680 kilobytes in size.

What is claimed is:

1. An isolated nucleic acid molecule comprising a polynucleotide having a nucleotide sequence selected from the group consisting of:
(a) a polynucleotide of (SEQ ID NOS: 1, 3, 5, 7, 9, 11, 13, 15, 17, 19, 21, 23, 25, 27, 29, 31, 33, 35, 37, 39, 41, 43, 45, 47, 49, 51, 53, 55, 57, 59, 61, 63, 65, 67, 69, 71, 73, 75, 77, 79, 81, 83, 85, 87, 89, 91, 93, 95, 97, 99, 101, 103, 105, 107, 109, 111, 113, 115, 117, 119, 121, 123, 125, 127, 129, 131, 133, 135, 137, 139, 141, 143, 145, 147, 149, 151, 153, 155, 157, 159, 161, 163, 165, 167, 169, 171, 173, 175, 177, 179, 181, 183, 185, 187, 189, 191, 193, 195, 197, 199, 201, 203, 205, 207, 209, 211, 213, 215, 217, 219, 221, 223, 225, 227, 229, 231, 233, 235, 237, 239, 241, 243, 245, 247, 249, 251, 253, 255, 257, 259, 261, 263, 265, 267, 269, 271, 273, 275, 277, 279, 281, 283, 285, 287, 289, 291, 293, 295, 297, 299, 301, 303, 305, 307, 309, 311, 313, 315, 317, 319, 321, 323, 325, 327, 329, 331, 333, 335, 337, 339, 341, 343, 345, 347, 349, 351, 353, 355, 357, 359, 361, 363, 365, 367, 369, 371, 373, 375, 377, 379, 381, 383, 385, 387, 389, 391, 393, 395, 397, 399, 401, 403, 405, 407, 409, 411, 413, 415, 417, 419, 421, 423, 425, 427, 429, 431, 433, 435, 437, 439, 441, 443, 444, 446, 448, 450, 452, 454, 456, 458, 459, 461, 463, 465, 467, 469, 471, 473, 475, 477, 479, 481, 483, 485, 487, 489, 491, 493, 495, 497, 499, 501, 503, 505, 507, 509, 511, 513, 515, 517, 519, 521, 523, 525, 527, 529, 530, 532, 533, 535, 537, 539, 541, 543, 545, 547, 549, 551, 553, 555, 557, 559, 561, 563, 565, 567, 569, 571, 573, 575, 577, 579, 581, 583, 585, 587, 589, 591, 593, 595, 597, 599, 601, 603, 605, 607, 609, 611, 612, 614, 616, 618, 620, 622, 624, 626, 628, 630, 632, 634, 636, 638, 639, 641, 643, 645, 647, 649, 651, 653, 655, 657, 659, 661, 663, 665, 667, 669, 671, 673, 675, 747, 749, 751, 753, 755, 757, 759, 761, 763, 765, 767, 769, 771, 773, 775, 777, 779 & 823);
(b) a polynucleotide encoding a polypeptide of SEQ ID NOS: 2, 4, 6, 8, 10, 12, 14, 16, 18, 20, 22, 24, 26, 28, 30, 32, 34, 36, 38, 40, 42, 44, 46, 48, 50, 52, 54, 56, 58, 60, 62, 64, 66, 68, 70, 72, 74, 76, 78, 80, 82, 84, 86, 88, 90, 92, 94, 96, 98, 100, 102, 104, 106, 108, 110, 112, 114, 116, 118, 120, 122, 124, 126, 128, 130, 132, 134, 136, 138, 140, 142, 144, 146, 148, 150, 152, 154, 156, 158, 160, 162, 164, 166, 168, 170, 172, 174, 176, 178, 180, 182, 184, 186, 188, 190, 192, 194, 196, 198, 200, 202, 204, 206, 208, 210, 212, 214, 216, 218, 220, 222, 224, 226, 228, 230, 232, 234, 236, 238, 240, 242, 244, 246, 248, 250, 252, 254, 256, 258, 260, 262, 264, 266, 268, 270, 272, 274, 276, 278, 280, 282, 284, 286, 288, 290, 292, 294, 296, 298, 300, 302, 304, 306, 308, 310, 312, 314, 316, 318, 320, 322, 324, 326, 328, 330, 332, 334, 336, 338, 340, 342, 344, 346, 348, 350, 352, 354, 356, 358, 360, 362, 364, 366, 368, 370, 372, 374, 376, 378, 380, 382, 384, 386, 388, 390, 392, 394, 396, 398, 400, 402, 404, 406, 408, 410, 412, 414, 416, 418, 420, 422, 424, 426, 428, 430, 432, 434, 436, 438, 440, 442, 444, 446, 448, 450, 452, 454, 456, 458, 460, 462, 464, 466, 468, 470, 472, 474, 476, 478, 480, 482, 484, 486, 488, 490, 492, 494, 496, 498, 500, 502, 504, 506, 508, 510, 512, 514, 516, 518, 520, 522, 524, 526, 528, 530, 532, 534, 536, 538, 540, 542, 544, 546, 548, 550, 552, 554, 556, 558, 560, 562, 564, 566, 568, 570, 572, 574, 576, 578, 580, 582, 584, 586, 588, 590, 592, 594, 596, 598, 600, 602, 604, 606, 608, 610, 612, 614, 616, 618, 620, 622, 624, 626, 628, 630, 632, 634, 636, 638, 640, 642, 644, 646, 648, 650, 652, 654, 656, 658, 660, 662, 664, 666, 668, 670, 672, 674, 676, 748, 750, 752, 754, 756, 758, 760, 762, 764, 766, 768, 770, 772, 774, 776, 778, & 780, which is hybridizable to SEQ ID NOS: (SEQ ID NOS: 1, 3, 5, 7, 9, 11, 13, 15, 17, 19, 21, 23, 25, 27, 29, 31, 33, 35, 37, 39, 41, 43, 45, 47, 49, 51, 53, 55, 57, 59, 61, 63, 65, 67, 69, 71, 73, 75, 77, 79, 81, 83, 85, 87, 89, 91, 93, 95, 97, 99, 101, 103, 105, 107, 109, 111, 113, 115, 117, 119, 121, 123, 125, 127, 129, 131, 133, 135, 137, 139, 141, 143, 145, 147, 149, 151, 153, 155, 157, 159, 161, 163, 165, 167, 169, 171, 173, 175, 177, 179, 181, 183, 185, 187, 189, 191, 193, 195, 197, 199, 201, 203, 205, 207, 209, 211, 213, 215, 217, 219, 221, 223, 225, 227, 229, 231, 233, 235, 237, 239, 241, 243, 245, 247, 249, 251, 253, 255, 257, 259, 261, 263, 265, 267, 269, 271, 273, 275, 277, 279, 281, 283, 285, 287, 289, 291, 293, 295, 297, 299, 301, 303, 305, 307, 309, 311, 313, 315, 317, 319, 321, 323, 325, 327, 329, 331, 333, 335, 337, 339, 341, 343, 345, 347, 349, 351, 353, 355, 357, 359, 361, 363, 365, 367, 369, 371, 373, 375, 377, 379, 381, 383, 385, 387, 389, 391, 393, 395, 397, 399, 401, 403, 405, 407, 409, 411, 413, 415, 417, 419, 421, 423, 425, 427, 429, 431, 433, 435, 437, 439, 441, 443, 444, 446, 448, 450, 452, 454, 456, 458, 459, 461, 463, 465, 467, 469, 471, 473, 475, 477, 479, 481, 483, 485, 487, 489, 491, 493, 495, 497, 499, 501, 503, 505, 507, 509, 511, 513, 515, 517, 519, 521, 523, 525, 527, 529, 530, 532, 533, 535, 537, 539, 541, 543, 545, 547, 549, 551, 553, 555, 557, 559, 561, 563, 565, 567, 569, 571, 573, 575, 577, 579, 581, 583, 585, 587, 589, 591, 593, 595, 597, 599, 601, 603, 605, 607, 609, 611, 612, 614, 616, 618, 620, 622, 624, 626, 628, 630, 632, 634, 636, 638, 639, 641, 643, 645, 647, 649, 651, 653, 655, 657, 659, 661, 663, 665, 667, 669, 671, 673, 675, 747, 749, 751, 753, 755, 757, 759, 761, 763, 765, 767, 769, 771, 773, 775, 777, 779 & 823);
(c) a polynucleotide encoding a polypeptide domain of SEQ ID-NOS: 2, 4, 6, 8, 10, 12, 14, 16, 18, 20, 22, 24, 26, 28, 30, 32, 34, 36, 38, 40, 42, 44, 46, 48, 50, 52, 54, 56, 58, 60, 62, 64, 66, 68, 70, 72, 74, 76, 78, 80, 82, 84, 86, 88, 90, 92, 94, 96, 98, 100, 102, 104, 106, 108, 110, 112, 114, 116, 118, 120, 122, 124, 126, 128, 130, 132, 134, 136, 138, 140, 142, 144, 146, 148, 150, 152, 154, 156, 158, 160, 162, 164, 166, 168, 170, 172, 174, 176, 178, 180, 182, 184, 186, 188, 190, 192, 194, 196, 198, 200, 202, 204, 206, 208, 210, 212, 214, 216, 218, 220, 222, 224, 226, 228, 230, 232, 234, 236, 238, 240, 242, 244, 246, 248, 250, 252, 254, 256, 258, 260, 262, 264, 266, 268, 270, 272, 274, 276, 278, 280, 282, 284, 286, 288, 290, 292, 294, 296, 298, 300, 302, 304, 306, 308, 310, 312, 314, 316, 318, 320, 322, 324, 326, 328, 330, 332, 334, 336, 338, 340, 342, 344, 346, 348, 350, 352, 354, 356, 358, 360, 362, 364, 366, 368, 370, 372, 374, 376, 378, 380, 382, 384, 386, 388, 390, 392, 394, 396, 398, 400, 402, 404, 406, 408, 410, 412, 414, 416, 418, 420, 422, 424, 426, 428, 430, 432, 434, 436, 438, 440, 442, 444, 446, 448, 450, 452, 454, 456, 458, 460, 462, 464, 466, 468, 470, 472, 474, 476, 478, 480, 482, 484, 486, 488, 490, 492, 494, 496, 498, 500, 502, 504, 506, 508, 510, 512, 514, 516, 518, 520, 522, 524, 526, 528, 530, 532, 534, 536, 538, 540, 542, 544, 546, 548, 550, 552, 554, 556, 558, 560, 562, 564, 566, 568, 570, 572, 574, 576, 578, 580, 582, 584, 586, 588, 590, 592, 594, 596, 598, 600, 602, 604, 606, 608, 610, 612, 614, 616, 618, 620, 622, 624, 626, 628, 630, 632, 634, 636, 638, 640, 642, 644, 646, 648, 650, 652, 654, 656, 658, 660, 662, 664, 666, 668, 670, 672, 674, 676, 748, 750, 752, 754, 756, 758, 760, 762, 764, 766, 768, 770, 772, 774, 776, 778, & 780 which is hybridizable to SEQ ID NOS: (SEQ ID NOS: 1, 3, 5, 7, 9, 11, 13, 15, 17, 19, 21, 23, 25, 27, 29, 31, 33, 35, 37, 39, 41, 43, 45, 47, 49, 51, 53, 55, 57, 59, 61, 63, 65, 67, 69, 71, 73, 75, 77, 79, 81, 83, 85, 87, 89, 91, 93, 95, 97, 99, 101, 103, 105, 107, 109, 111, 113, 115, 117, 119, 121, 123, 125, 127, 129, 131, 133, 135, 137, 139, 141, 143, 145, 147, 149, 151, 153, 155, 157, 159, 161, 163, 165, 167, 169, 171, 173, 175, 177, 179, 181, 183, 185, 187, 189, 191, 193, 195, 197, 199, 201, 203, 205, 207, 209, 211, 213, 215, 217, 219, 221, 223, 225, 227, 229, 231, 233, 235, 237, 239, 241, 243, 245, 247, 249, 251, 253, 255, 257, 259, 261, 263, 265, 267, 269, 271, 273, 275, 277, 279, 281, 283, 285, 287, 289, 291, 293, 295, 297, 299, 301, 303, 305, 307, 309, 311, 313, 315, 317, 319, 321, 323, 325, 327, 329, 331, 333, 335, 337, 339, 341, 343, 345, 347, 349, 351, 353, 355, 357, 359, 361, 363, 365, 367, 369, 371, 373, 375, 377, 379, 381, 383, 385, 387, 389, 391, 393, 395, 397, 399, 401, 403, 405, 407, 409, 411, 413, 415, 417, 419, 421, 423, 425, 427, 429, 431, 433, 435, 437, 439, 441, 443, 444, 446, 448, 450, 452, 454, 456, 458, 459, 461, 463, 465, 467, 469, 471, 473, 475, 477, 479, 481, 483, 485, 487, 489, 491, 493, 495, 497, 499, 501, 503, 505, 507, 509, 511, 513, 515, 517, 519, 521, 523, 525, 527, 529, 530, 532, 533, 535, 537, 539, 541, 543, 545, 547, 549, 551, 553, 555, 557, 559, 561, 563, 565, 567, 569, 571, 573, 575, 577, 579, 581, 583, 585, 587, 589, 591, 593, 595, 597, 599, 601, 603, 605, 607, 609, 611, 612, 614, 616, 618, 620, 622, 624, 626, 628, 630, 632, 634, 636, 638, 639, 641, 643, 645, 647, 649, 651, 653, 655, 657, 659, 661, 663, 665, 667, 669, 671, 673, 675, 747, 749, 751, 753, 755, 757, 759, 761, 763, 765, 767, 769, 771, 773, 775, 777, 779 & 823);
(d) a polynucleotide encoding a polypeptide epitope of SEQ ID NOS: 2, 4, 6, 8, 10, 12, 14, 16, 18, 20, 22, 24, 26, 28, 30, 32, 34, 36, 38, 40, 42, 44, 46, 48, 50, 52, 54, 56, 58, 60, 62, 64, 66, 68, 70, 72, 74, 76, 78, 80, 82, 84, 86, 88, 90, 92, 94, 96, 98, 100, 102, 104, 106, 108, 110, 112, 114, 116, 118, 120, 122, 124, 126, 128, 130, 132, 134, 136, 138, 140, 142, 144, 146, 148, 150, 152, 154, 156, 158, 160, 162, 164, 166, 168, 170, 172, 174, 176, 178, 180, 182, 184, 186, 188, 190, 192, 194, 196, 198, 200, 202, 204, 206, 208, 210, 212, 214, 216, 218, 220, 222, 224, 226, 228, 230, 232, 234, 236, 238, 240, 242, 244, 246, 248, 250, 252, 254, 256, 258, 260, 262, 264, 266, 268, 270, 272, 274, 276, 278, 280, 282, 284, 286, 288, 290, 292, 294, 296, 298, 300, 302, 304, 306, 308, 310, 312, 314, 316, 318, 320, 322, 324, 326, 328, 330, 332, 334, 336, 338, 340, 342, 344, 346, 348, 350, 352, 354, 356, 358, 360, 362, 364, 366, 368, 370, 372, 374, 376, 378, 380, 382, 384, 386, 388, 390, 392, 394, 396, 398, 400, 402, 404, 406, 408, 410, 412, 414, 416, 418, 420, 422, 424, 426, 428, 430, 432, 434, 436, 438, 440, 442, 444, 446, 448, 450, 452, 454, 456, 458, 460, 462, 464, 466, 468, 470, 472, 474, 476, 478, 480, 482, 484, 486, 488, 490, 492, 494, 496, 498, 500, 502, 504, 506, 508, 510, 512, 514, 516, 518, 520, 522, 524, 526, 528, 530, 532, 534, 536, 538, 540, 542, 544, 546, 548, 550, 552, 554, 556, 558, 560, 562, 564, 566, 568, 570, 572, 574, 576, 578, 580, 582, 584, 586, 588, 590, 592, 594, 596, 598, 600, 602, 604, 606, 608, 610, 612, 614, 616, 618, 620, 622, 624, 626, 628, 630, 632, 634, 636, 638, 640, 642, 644, 646, 648, 650, 652, 654, 656, 658, 660, 662, 664, 666, 668, 670, 672, 674, 676, 748, 750, 752, 754, 756, 758, 760, 762, 764, 766, 768, 770, 772, 774, 776, 778, & 780, which is hybridizable to SEQ ID NOS: (SEQ ID NOS: 1, 3, 5, 7, 9, 11, 13, 15, 17, 19, 21, 23, 25, 27, 29, 31, 33, 35, 37, 39, 41, 43, 45, 47, 49, 51, 53, 55, 57, 59, 61, 63, 65, 67, 69, 71, 73, 75, 77, 79, 81, 83, 85, 87, 89, 91, 93, 95, 97, 99, 101, 103, 105, 107, 109, 111, 113, 115, 117, 119, 121, 123, 125, 127, 129, 131, 133, 135, 137, 139, 141, 143, 145, 147, 149, 151, 153, 155, 157, 159, 161, 163, 165, 167, 169, 171, 173, 175, 177, 179, 181, 183, 185, 187, 189, 191, 193, 195, 197, 199, 201, 203, 205, 207, 209, 211, 213, 215, 217, 219, 221, 223, 225, 227, 229, 231, 233, 235, 237, 239, 241, 243, 245, 247, 249, 251, 253, 255, 257, 259, 261, 263, 265, 267, 269, 271, 273, 275, 277, 279, 281, 283, 285, 287, 289, 291, 293, 295, 297, 299, 301, 303, 305, 307, 309, 311, 313, 315, 317, 319, 321, 323, 325, 327, 329, 331, 333, 335, 337, 339, 341, 343, 345, 347, 349, 351, 353, 355, 357, 359, 361, 363, 365, 367, 369, 371, 373, 375, 377, 379, 381, 383, 385, 387, 389, 391, 393, 395, 397, 399, 401, 403, 405, 407, 409, 411, 413, 415, 417, 419, 421, 423, 425, 427, 429, 431, 433, 435, 437, 439, 441, 443, 444, 446, 448, 450, 452, 454, 456, 458, 459, 461, 463, 465, 467, 469, 471, 473, 475, 477, 479, 481, 483, 485, 487, 489, 491, 493, 495, 497, 499, 501, 503, 505, 507, 509, 511, 513, 515, 517, 519, 521, 523, 525, 527, 529, 530, 532, 533, 535, 537, 539, 541, 543, 545, 547, 549, 551, 553, 555, 557, 559, 561, 563, 565, 567, 569, 571, 573, 575, 577, 579, 581, 583, 585, 587, 589, 591, 593, 595, 597, 599, 601, 603, 605, 607, 609, 611, 612, 614, 616, 618, 620, 622, 624, 626, 628, 630, 632, 634, 636, 638, 639, 641, 643, 645, 647, 649, 651, 653, 655, 657, 659, 661, 663, 665, 667, 669, 671, 673, 675, 747, 749, 751, 753, 755, 757, 759, 761, 763, 765, 767, 769, 771, 773, 775, 777, 779 & 823);
(e) a polynucleotide encoding a polypeptide of SEQ ID NOS: 2, 4, 6, 8, 10, 12, 14, 16, 18, 20, 22, 24, 26, 28, 30, 32, 34, 36, 38, 40, 42, 44, 46, 48, 50, 52, 54, 56, 58, 60, 62, 64, 66, 68, 70, 72, 74, 76, 78, 80, 82, 84, 86, 88, 90, 92, 94, 96, 98, 100, 102, 104, 106, 108, 110, 112, 114, 116, 118, 120, 122, 124, 126, 128, 130, 132, 134, 136, 138, 140, 142, 144, 146, 148, 150, 152, 154, 156, 158, 160, 162, 164, 166, 168, 170, 172, 174, 176, 178, 180, 182, 184, 186, 188, 190, 192, 194, 196, 198, 200, 202, 204, 206, 208, 210, 212, 214, 216, 218, 220, 222, 224, 226, 228, 230, 232, 234, 236, 238, 240, 242, 244, 246, 248, 250, 252, 254, 256, 258, 260, 262, 264, 266, 268, 270, 272, 274, 276, 278, 280, 282, 284, 286, 288, 290, 292, 294, 296, 298, 300, 302, 304, 306, 308, 310, 312, 314, 316, 318, 320, 322, 324, 326, 328, 330, 332, 334, 336, 338, 340, 342, 344, 346, 348, 350, 352, 354, 356, 358, 360, 362, 364, 366, 368, 370, 372, 374, 376, 378, 380, 382, 384, 386, 388, 390, 392, 394, 396, 398, 400, 402, 404, 406, 408, 410, 412, 414, 416, 418, 420, 422, 424, 426, 428, 430, 432, 434, 436, 438, 440, 442, 444, 446, 448, 450, 452, 454, 456, 458, 460, 462, 464, 466, 468, 470, 472, 474, 476, 478, 480, 482, 484, 486, 488, 490, 492, 494, 496, 498, 500, 502, 504, 506, 508, 510, 512, 514, 516, 518, 520, 522, 524, 526, 528, 530, 532, 534, 536, 538, 540, 542, 544, 546, 548, 550, 552, 554, 556, 558, 560, 562, 564, 566, 568, 570, 572, 574, 576, 578, 580, 582, 584, 586, 588, 590, 592, 594, 596, 598, 600, 602, 604, 606, 608, 610, 612, 614, 616, 618, 620, 622, 624, 626, 628, 630, 632, 634, 636, 638, 640, 642, 644, 646, 648, 650, 652, 654, 656, 658, 660, 662, 664, 666, 668, 670, 672, 674, 676, 748, 750, 752, 754, 756, 758, 760, 762, 764, 766, 768, 770, 772, 774, 776, 778, & 780 which is hybridizable to SEQ ID NOS: (SEQ ID NOS: 1, 3, 5, 7, 9, 11, 13, 15, 17, 19, 21, 23, 25, 27, 29, 31, 33, 35, 37, 39, 41, 43, 45, 47, 49, 51, 53, 55, 57, 59, 61, 63, 65, 67, 69, 71, 73, 75, 77, 79, 81, 83, 85, 87, 89, 91, 93, 95, 97, 99, 101, 103, 105, 107, 109, 111, 113, 115, 117, 119, 121, 123, 125, 127, 129, 131, 133, 135, 137, 139, 141, 143, 145, 147, 149, 151, 153, 155, 157, 159, 161, 163, 165, 167, 169, 171, 173, 175, 177, 179, 181, 183, 185, 187, 189, 191, 193, 195, 197, 199, 201, 203, 205, 207, 209, 211, 213, 215, 217, 219, 221, 223, 225, 227, 229, 231, 233, 235, 237, 239, 241, 243, 245, 247, 249, 251, 253, 255, 257, 259, 261, 263, 265, 267, 269, 271, 273, 275, 277, 279, 281, 283, 285, 287, 289, 291, 293, 295, 297, 299, 301, 303, 305, 307, 309, 311, 313, 315, 317, 319, 321, 323, 325, 327, 329, 331, 333, 335, 337, 339, 341, 343, 345, 347, 349, 351, 353, 355, 357, 359, 361, 363, 365, 367, 369, 371, 373, 375, 377, 379, 381, 383, 385, 387, 389, 391, 393, 395, 397, 399, 401, 403, 405, 407, 409, 411, 413, 415, 417, 419, 421, 423, 425, 427, 429, 431, 433, 435, 437, 439, 441, 443, 444, 446, 448, 450, 452, 454, 456, 458, 459, 461, 463, 465, 467, 469, 471, 473, 475, 477, 479, 481, 483, 485, 487, 489, 491, 493, 495, 497, 499, 501, 503, 505, 507, 509, 511, 513, 515, 517, 519, 521, 523, 525, 527, 529, 530, 532, 533, 535, 537, 539, 541, 543, 545, 547, 549, 551, 553, 555, 557, 559, 561, 563, 565, 567, 569, 571, 573, 575, 577, 579, 581, 583, 585, 587, 589, 591, 593, 595, 597, 599, 601, 603, 605, 607, 609, 611, 612, 614, 616, 618, 620, 622, 624, 626, 628, 630, 632, 634, 636, 638, 639, 641, 643, 645, 647, 649, 651, 653, 655, 657, 659, 661, 663, 665, 667, 669, 671, 673, 675, 747, 749, 751, 753, 755, 757, 759, 761, 763, 765, 767, 769, 771, 773, 775, 777, 779 & 823); having NF-κB modulating activity;
(f) a polynucleotide which is a variant of (SEQ ID NOS: 1, 3, 5, 7, 9, 11, 13, 15, 17, 19, 21, 23, 25, 27, 29, 31, 33, 35, 37, 39, 41, 43, 45, 47, 49, 51, 53, 55, 57, 59, 61, 63, 65, 67, 69, 71, 73, 75, 77, 79, 81, 83, 85, 87, 89, 91, 93, 95, 97, 99, 101, 103, 105, 107, 109, 111, 113, 115, 117, 119, 121, 123, 125, 127, 129, 131, 133, 135, 137, 139, 141, 143, 145, 147, 149, 151, 153, 155, 157, 159, 161, 163, 165, 167, 169, 171, 173, 175, 177, 179, 181, 183, 185, 187, 189, 191, 193, 195, 197, 199, 201, 203, 205, 207, 209, 211, 213, 215, 217, 219, 221, 223, 225, 227, 229, 231, 233, 235, 237, 239, 241, 243, 245, 247, 249, 251, 253, 255, 257, 259, 261, 263, 265, 267, 269, 271, 273, 275, 277, 279, 281, 283, 285, 287, 289, 291, 293, 295, 297, 299, 301, 303, 305, 307, 309, 311, 313, 315, 317, 319, 321, 323, 325, 327, 329, 331, 333, 335, 337, 339, 341, 343, 345, 347, 349, 351, 353, 355, 357, 359, 361, 363, 365, 367, 369, 371, 373, 375, 377, 379, 381, 383, 385, 387, 389, 391, 393, 395, 397, 399, 401, 403, 405, 407, 409, 411, 413, 415, 417, 419, 421, 423, 425, 427, 429, 431, 433, 435, 437, 439, 441, 443, 444, 446, 448, 450, 452, 454, 456, 458, 459, 461, 463, 465, 467, 469, 471, 473, 475, 477, 479, 481, 483, 485, 487, 489, 491, 493, 495, 497, 499, 501, 503, 505, 507, 509, 511, 513, 515, 517, 519, 521, 523, 525, 527, 529, 530, 532, 533, 535, 537, 539, 541, 543, 545, 547, 549, 551, 553, 555, 557, 559, 561, 563, 565, 567, 569, 571, 573, 575, 577, 579, 581, 583, 585, 587, 589, 591, 593, 595, 597, 599, 601, 603, 605, 607, 609, 611, 612, 614, 616, 618, 620, 622, 624, 626, 628, 630, 632, 634, 636, 638, 639, 641, 643, 645, 647, 649, 651, 653, 655, 657, 659, 661, 663, 665, 667, 669, 671, 673, 675, 747, 749, 751, 753, 755, 757, 759, 761, 763, 765, 767, 769, 771, 773, 775, 777, 779 & 823);
(g) a polynucleotide which is an allelic variant of (SEQ ID NOS: 1, 3, 5, 7, 9, 11, 13, 15, 17, 19, 21, 23, 25, 27, 29, 31, 33, 35, 37, 39, 41, 43, 45, 47, 49, 51, 53, 55, 57, 59, 61, 63, 65, 67, 69, 71, 73, 75, 77, 79, -81, 83, 85, 87, 89, 91, 93, 95, 97, 99, 101, 103, 105, 107, 109, 111, 113, 115, 117, 119, 121, 123, 125, 127, 129, 131, 133, 135, 137, 139, 141, 143, 145, 147, 149, 151, 153, 155, 157, 159, 161, 163, 165, 167, 169, 171, 173, 175, 177, 179, 181, 183, 185, 187, 189, 191, 193, 195, 197, 199, 201, 203, 205, 207, 209, 211, 213, 215, 217, 219, 221, 223, 225, 227, 229, 231, 233, 235, 237, 239, 241, 243, 245, 247, 249, 251, 253, 255, 257, 259, 261, 263, 265, 267, 269, 271, 273, 275, 277, 279, 281, 283, 285, 287, 289, 291, 293, 295, 297, 299, 301, 303, 305, 307, 309, 311, 313, 315, 317, 3.19, 321, 323, 325, 327, 329, 331, 333, 335, 337, 339, 341, 343, 345, 347, 349, 351, 353, 355, 357, 359, 361, 363, 365, 367, 369, 371, 373, 375, 377, 379, 381, 383, 385, 387, 389, 391, 393, 395, 397, 399, 401, 403, 405, 407, 409, 411, 413, 415, 417, 419, 421, 423, 425, 427, 429, 431, 433, 435, 437, 439, 441, 443, 444, 446, 448, 450, 452, 454, 456, 458, 459, 461, 463, 465, 467, 469, 471, 473, 475, 477, 479, 481, 483, 485, 487, 489, 491, 493, 495, 497, 499, 501, 503, 505, 507, 509, 511, 513, 515, 517, 519, 521, 523, 525, 527, 529, 530, 532, 533, 535, 537, 539, 541, 543, 545, 547, 549, 551, 553, 555, 557, 559, 561, 563, 565, 567, 569, 571, 573, 575, 577, 579, 581, 583, 585, 587, 589, 591, 593, 595, 597, 599, 601, 603, 605, 607, 609, 611, 612, 614, 616, 618, 620, 622, 624, 626, 628, 630, 632, 634, 636, 638, 639, 641, 643, 645, 647, 649, 651, 653, 655, 657, 659, 661, 663, 665, 667, 669, 671, 673, 675, 747, 749, 751, 753, 755, 757, 759, 761, 763, 765, 767, 769, 771, 773, 775, 777, 779 & 823);
(h) a polynucleotide which encodes a species homologue of the (SEQ ID NOS: 1, 3, 5, 7, 9, 11, 13, 15, 17, 19, 21, 23, 25, 27, 29, 31, 33, 35, 37, 39, 41, 43, 45, 47, 49, 51, 53, 55, 57, 59, 61, 63, 65, 67, 69, 71, 73, 75, 77, 79, 81, 83, 85, 87, 89, 91, 93, 95, 97, 99, 101, 103, 105, 107, 109, 111, 113, 115, 117, 119, 121, 123, 125, 127, 129, 131, 133, 135, 137, 139, 141, 143, 145, 147, 149, 151, 153, 155, 157, 159, 161, 163, 165, 167, 169, 171, 173, 175, 177, 179, 181, 183, 185, 187, 189, 191, 193, 195, 197, 199, 201, 203, 205, 207, 209, 211, 213, 215, 217, 219, 221, 223, 225, 227, 229, 231, 233, 235, 237, 239, 241, 243, 245, 247, 249, 251, 253, 255, 257, 259, 261, 263, 265, 267, 269, 271, 273, 275, 277, 279, 281, 283, 285, 287, 289, 291, 293, 295, 297, 299, 301, 303, 305, 307, 309, 311, 313, 315, 317, 319, 321, 323, 325, 327, 329, 331, 333, 335, 337, 339, 341, 343, 345, 347, 349, 351, 353, 355, 357, 359, 361, 363, 365, 367, 369, 371, 373, 375, 377, 379, 381, 383, 385, 387, 389, 391, 393, 395, 397, 399, 401, 403, 405, 407, 409, 411, 413, 415, 417, 419, 421, 423, 425, 427, 429, 431, 433, 435, 437, 439, 441, 443, 444, 446, 448, 450, 452, 454, 456, 458, 459, 461, 463, 465, 467, 469, 471, 473, 475, 477, 479, 481, 483, 485, 487, 489, 491, 493, 495, 497, 499, 501, 503, 505, 507, 509, 511, 513, 515, 517, 519, 521, 523, 525, 527, 529, 530, 532, 533, 535, 537, 539, 541, 543, 545, 547, 549, 551, 553, 555, 557, 559, 561, 563, 565, 567, 569, 571, 573, 575, 577, 579, 581, 583, 585, 587, 589, 591, 593, 595, 597, 599, 601, 603, 605, 607, 609, 611, 612, 614, 616, 618, 620, 622, 624, 626, 628, 630, 632, 634, 636, 638, 639, 641, 643, 645, 647, 649, 651, 653, 655, 657, 659, 661, 663, 665, 667, 669, 671, 673, 675, 747, 749, 751, 753, 755, 757, 759, 761, 763, 765, 767, 769, 771, 773, 775, 777, 779 & 823);
(i) a polynucleotide which represents the complimentary sequence (antisense) of (SEQ ID NOS: 1, 3, 5, 7, 9, 11, 13, 15, 17, 19, 21, 23, 25, 27, 29, 31, 33, 35, 37, 39, 41, 43, 45, 47, 49, 51, 53, 55, 57, 59, 61, 63, 65, 67, 69, 71, 73, 75, 77, 79, 81, 83, 85, 87, 89, 91, 93, 95, 97, 99, 101, 103, 105, 107, 109, 111, 113, 115, 117, 119, 121, 123, 125, 127, 129, 131, 133, 135, 137, 139, 141, 143, 145, 147, 149, 151, 153, 155, 157, 159, 161, 163, 165, 167, 169, 171, 173, 175, 177, 179, 181, 183, 185, 187, 189, 191, 193, 195, 197, 199, 201, 203, 205, 207, 209, 211, 213, 215, 217, 219, 221, 223, 225, 227, 229, 231, 233, 235, 237, 239, 241, 243, 245, 247, 249, 251, 253, 255, 257, 259, 261, 263, 265, 267, 269, 271, 273, 275, 277, 279, 281, 283, 285, 287, 289, 291, 293, 295, 297, 299, 301, 303, 305, 307, 309, 311, 313, 315, 317, 319, 321, 323, 325, 327, 329, 331, 333, 335, 337, 339, 341, 343, 345, 347, 349, 351, 353, 355, 357, 359, 361, 363, 365, 367, 369, 371, 373, 375, 377, 379, 381, 383, 385, 387, 389, 391, 393, 395, 397, 399, 401, 403, 405, 407, 409, 411, 413, 415, 417, 419, 421, 423, 425, 427, 429, 431, 433, 435, 437, 439, 441, 443, 444, 446, 448, 450, 452, 454, 456, 458, 459, 461, 463, 465, 467, 469, 471, 473, 475, 477, 479, 481, 483, 485, 487, 489, 491, 493, 495, 497, 499, 501, 503, 505, 507, 509, 511, 513, 515, 517, 519, 521, 523, 525, 527, 529, 530, 532, 533, 535, 537, 539, 541, 543, 545, 547, 549, 551, 553, 555, 557, 559, 561, 563, 565, 567, 569, 571, 573, 575, 577, 579, 581, 583, 585, 587, 589, 591, 593, 595, 597, 599, 601, 603, 605, 607, 609, 611, 612, 614, 616, 618, 620, 622, 624, 626, 628, 630, 632, 634, 636, 638, 639, 641, 643, 645, 647, 649, 651, 653, 655, 657, 659, 661, 663, 665, 667, 669, 671, 673, 675, 747, 749, 751, 753, 755, 757, 759, 761, 763, 765, 767, 769, 771, 773, 775, 777, 779 & 823); and
(j) a polynucleotide capable of hybridizing under stringent conditions to any one of the polynucleotides specified in (a)-(i), wherein said polynucleotide does not hybridize under stringent conditions to a nucleic acid molecule having a nucleotide sequence of only A residues or of only T residues.

2. The isolated nucleic acid molecule of claim 1, wherein the polynucleotide comprising a nucleotide sequence encoding a NF-κB modulatory protein, or fragment thereof.

3. The isolated nucleic acid molecule of claim 1, wherein the polynucleotide comprising a nucleotide sequence encoding the sequence identified as (SEQ ID NOS: 1, 3, 5, 7, 9, 11, 13, 15, 17, 19, 21, 23, 25, 27, 29, 31, 33, 35, 37, 39, 41, 43, 45, 47, 49, 51, 53, 55, 57, 59, 61, 63, 65, 67, 69, 71, 73, 75, 77, 79, 81, 83, 85, 87, 89, 91, 93, 95, 97, 99, 101, 103, 105, 107, 109, 111, 113, 115, 117, 119, 121, 123, 125, 127, 129, 131, 133, 135, 137, 139, 141, 143, 145, 147, 149, 151, 153, 155, 157, 159, 161, 163, 165, 167, 169, 171, 173, 175, 177, 179, 181, 183, 185, 187, 189, 191, 193, 195, 197, 199, 201, 203, 205, 207, 209, 211, 213, 215, 217, 219, 221, 223, 225, 227, 229, 231, 233, 235, 237, 239, 241, 243, 245, 247, 249, 251, 253, 255, 257, 259, 261, 263, 265, 267, 269, 271, 273, 275, 277, 279, 281, 283, 285, 287, 289, 291, 293, 295, 297, 299, 301, 303, 305, 307, 309, 311, 313, 315, 317, 319, 321, 323, 325, 327, 329, 331, 333, 335, 337, 339, 341, 343, 345, 347, 349, 351, 353, 355, 357, 359, 361, 363, 365, 367, 369, 371, 373, 375, 377, 379, 381, 383, 385, 387, 389, 391, 393, 395, 397, 399, 401, 403, 405, 407, 409, 411, 413, 415, 417, 419, 421, 423, 425, 427, 429, 431, 433, 435, 437, 439, 441, 443, 444, 446, 448, 450, 452, 454, 456, 458, 459, 461, 463, 465, 467, 469, 471, 473, 475, 477, 479, 481, 483, 485, 487, 489, 491, 493, 495, 497, 499, 501, 503, 505, 507, 509, 511, 513, 515, 517, 519, 521, 523, 525, 527, 529, 530, 532, 533, 535, 537, 539, 541, 543, 545, 547, 549, 551, 553, 555, 557, 559, 561, 563, 565, 567, 569, 571, 573, 575, 577, 579, 581, 583, 585, 587, 589, 591, 593, 595, 597, 599, 601, 603, 605, 607, 609, 611, 612, 614, 616, 618, 620, 622, 624, 626, 628, 630, 632, 634, 636, 638, 639, 641, 643, 645, 647, 649, 651, 653, 655, 657, 659, 661, 663, 665, 667, 669, 671, 673, 675, 747, 749, 751, 753, 755, 757, 759, 761, 763, 765, 767, 769, 771, 773, 775, 777, 779 & 823); which is hybridizable to (SEQ ID NOS: 1, 3, 5, 7, 9, 11, 13, 15, 17, 19, 21, 23, 25, 27, 29, 31, 33, 35, 37, 39, 41, 43, 45, 47, 49, 51, 53, 55, 57, 59, 61, 63, 65, 67, 69, 71, 73, 75, 77, 79, 81, 83, 85, 87, 89, 91, 93, 95, 97, 99, 101, 103, 105, 107, 109, 111, 113, 115, 117, 119, 121, 123, 125, 127, 129, 131, 133, 135, 137, 139, 141, 143, 145, 147, 149, 151, 153, 155, 157, 159, 161, 163, 165, 167, 169, 171, 173, 175, 177, 179, 181, 183, 185, 187, 189, 191, 193, 195, 197, 199, 201, 203, 205, 207, 209, 211, 213, 215, 217, 219, 221, 223, 225, 227, 229, 231, 233, 235, 237, 239, 241, 243, 245, 247, 249, 251, 253, 255, 257, 259, 261, 263, 265, 267, 269, 271, 273, 275, 277, 279, 281, 283, 285, 287, 289, 291, 293, 295, 297, 299, 301, 303, 305, 307, 309, 311, 313, 315, 317, 319, 321, 323, 325, 327, 329, 331, 333, 335, 337, 339, 341, 343, 345, 347, 349, 351, 353, 355, 357, 359, 361, 363, 365, 367, 369, 371, 373, 375, 377, 379, 381, 383, 385, 387, 389, 391, 393, 395, 397, 399, 401, 403, 405, 407, 409, 411, 413, 415, 417, 419, 421, 423, 425, 427, 429, 431, 433, 435, 437, 439, 441, 443, 444, 446, 448, 450, 452, 454, 456, 458, 459, 461, 463, 465, 467, 469, 471, 473, 475, 477, 479, 481, 483, 485, 487, 489, 491, 493, 495, 497, 499, 501, 503, 505, 507, 509, 511, 513, 515, 517, 519, 521, 523, 525, 527, 529, 530, 532, 533, 535, 537, 539, 541, 543, 545, 547, 549, 551, 553, 555, 557, 559, 561, 563, 565, 567, 569 571, 573, 575, 577, 579, 581, 583, 585, 587, 589, 591, 593, 595, 597, 599, 601, 603, 605, 607, 609, 611, 612, 614, 616, 618, 620, 622, 624, 626, 628, 630, 632, 634, 636, 638, 639, 641, 643, 645, 647, 649, 651, 653, 655, 657, 659, 661, 663, 665, 667, 669, 671, 673, 675, 747, 749, 751, 753, 755, 757, 759, 761, 763, 765, 767, 769, 771, 773, 775, 777, 779 & 823).

4. The isolated nucleic acid molecule of claim 1, wherein the polynucleotide comprising the entire nucleotide sequence of (SEQ ID NOS: 1, 3, 5, 7, 9, 11, 13, 15, 17, 19, 21, 23, 25, 27, 29, 31, 33, 35, 37, 39, 41, 43, 45, 47, 49, 51, 53, 55, 57, 59, 61, 63, 65, 67, 69, 71, 73, 75, 77, 79, 81, 83, 85, 87, 89, 91, 93, 95, 97, 99, 101, 103, 105, 107, 109, 111, 113, 115, 117, 119, 121, 123, 125, 127, 129, 131, 133, 135, 137, 139, 141, 143, 145, 147, 149, 151, 153, 155, 157, 159, 161, 163, 165, 167, 169, 171, 173, 175, 177, 179, 181, 183, 185, 187, 189, 191, 193, 195, 197, 199, 201, 203, 205, 207, 209, 211, 213, 215, 217, 219, 221, 223, 225, 227, 229, 231, 233, 235, 237, 239, 241, 243, 245, 247, 249, 251, 253, 255, 257, 259, 261, 263, 265, 267, 269, 271, 273, 275, 277, 279, 281, 283, 285, 287, 289, 291, 293, 295, 297, 299, 301, 303, 305, 307, 309, 311, 313, 315, 317, 319, 321, 323, 325, 327, 329, 331, 333, 335, 337, 339, 341, 343, 345, 347, 349, 351, 353, 355, 357, 359, 361, 363, 365, 367, 369, 371, 373, 375, 377, 379, 381, 383, 385, 387, 389, 391, 393, 395, 397, 399, 401, 403, 405, 407, 409, 411, 413, 415, 417, 419, 421, 423, 425, 427, 429, 431, 433, 435, 437, 439, 441, 443, 444, 446, 448, 450, 452, 454, 456, 458, 459, 461, 463, 465, 467, 469, 471, 473, 475, 477, 479, 481, 483, 485, 487, 489, 491, 493, 495, 497, 499, 501, 503, 505, 507, 509, 511, 513, 515, 517, 519, 521, 523, 525, 527, 529, 530, 532, 533, 535, 537, 539, 541, 543, 545, 547, 549, 551, 553, 555, 557, 559, 561, 563, 565, 567, 569, 571, 573, 575, 577, 579, 581, 583, 585, 587, 589, 591, 593, 595, 597, 599, 601, 603, 605, 607, 609, 611, 612, 614, 616, 618, 620, 622, 624, 626, 628, 630, 632, 634, 636, 638, 639, 641, 643, 645, 647, 649, 651, 653, 655, 657, 659, 661, 663, 665, 667, 669, 671, 673, 675, 747, 749, 751, 753, 755, 757, 759, 761, 763, 765, 767, 769, 771, 773, 775, 777, 779 & 823); which is hybridizable to (SEQ ID NOS: 1, 3, 5, 7, 9, 11, 13, 15, 17, 19, 21, 23, 25, 27, 29, 31, 33, 35, 37, 39, 41, 43, 45, 47, 49, 51, 53, 55, 57, 59, 61, 63, 65, 67, 69, 71, 73, 75, 77, 79, 81, 83, 85, 87, 89, 91, 93, 95, 97, 99, 101, 103, 105, 107, 109, 111, 113, 115, 117, 119, 121, 123, 125, 127, 129, 131, 133, 135, 137, 139, 141, 143, 145, 147, 149, 151, 153, 155, 157, 159, 161, 163, 165, 167, 169, 171, 173, 175, 177, 179, 181, 183, 185, 187, 189, 191, 193, 195, 197, 199, 201, 203, 205, 207, 209, 211, 213, 215, 217, 219, 221, 223, 225, 227, 229, 231, 233, 235, 237, 239, 241, 243, 245, 247, 249, 251, 253, 255, 257, 259, 261, 263, 265, 267, 269, 271, 273, 275, 277, 279, 281, 283, 285, 287, 289, 291, 293, 295, 297, 299, 301, 303, 305, 307, 309, 311, 313, 315, 317, 319, 321, 323, 325, 327, 329, 331, 333, 335, 337, 339, 341, 343, 345, 347, 349, 351, 353, 355, 357, 359, 361, 363, 365, 367, 369, 371, 373, 375, 377, 379, 381, 383, 385, 387, 389, 391, 393, 395, 397, 399, 401, 403, 405, 407, 409, 411, 413, 415, 417, 419, 421, 423, 425, 427, 429, 431, 433, 435, 437, 439, 441, 443, 444, 446, 448, 450, 452, 454, 456, 458, 459, 461, 463, 465, 467, 469, 471, 473, 475, 477, 479, 481, 483, 485, 487, 489, 491, 493, 495, 497, 499, 501, 503, 505, 507, 509, 511, 513, 515, 517, 519, 521, 523, 525, 527, 529, 530, 532, 533, 535, 537, 539, 541, 543, 545, 547, 549, 551, 553, 555, 557, 559, 561, 563, 565, 567, 569, 571, 573, 575, 577, 579, 581, 583, 585, 587, 589, 591, 593, 595, 597, 599, 601, 603, 605, 607, 609, 611, 612, 614, 616, 618, 620, 622, 624, 626, 628, 630, 632, 634, 636, 638, 639, 641, 643, 645, 647, 649, 651, 653, 655, 657, 659, 661, 663, 665, 667, 669, 671, 673, 675, 747, 749, 751, 753, 755, 757, 759, 761, 763, 765, 767, 769, 771, 773, 775, 777, 779 & 823).

5. The isolated nucleic acid molecule of claim 2, wherein the nucleotide sequence consisting of sequential nucleotide deletions from either the C-terminus or the N-terminus.

6. An isolated polypeptide comprising an amino acid sequence selected from the group consisting of:
(a) a polypeptide of SEQ ID NOS: 2, 4, 6, 8, 10, 12, 14, 16, 18, 20, 22, 24, 26, 28, 30, 32, 34, 36, 38, 40, 42, 44, 46, 48, 50, 52, 54, 56, 58, 60, 62, 64, 66, 68, 70, 72, 74, 76, 78, 80, 82, 84, 86, 88, 90, 92, 94, 96, 98, 100, 102, 104, 106, 108, 110, 112, 114, 116, 118, 120, 122, 124, 126, 128, 130, 132, 134, 136, 138, 140, 142, 144, 146, 148, 150, 152, 154, 156, 158, 160, 162, 164, 166, 168, 170, 172, 174, 176, 178, 180, 182, 184, 186, 188, 190, 192, 194, 196, 198, 200, 202, 204, 206, 208, 210, 212, 214, 216, 218, 220, 222, 224, 226, 228, 230, 232, 234, 236, 238, 240, 242, 244, 246, 248, 250, 252, 254, 256, 258, 260, 262, 264, 266, 268, 270, 272, 274, 276, 278, 280, 282, 284, 286, 288, 290, 292, 294, 296, 298, 300, 302, 304, 306, 308, 310, 312, 314, 316, 318, 320, 322, 324, 326, 328, 330, 332, 334, 336, 338, 340, 342, 344, 346, 348, 350, 352, 354, 356, 358, 360, 362, 364, 366, 368, 370, 372, 374, 376, 378, 380, 382, 384, 386, 388, 390, 392, 394, 396, 398, 400, 402, 404, 406, 408, 410, 412, 414, 416, 418, 420, 422, 424, 426, 428, 430, 432, 434, 436, 438, 440, 442, 444, 446, 448, 450, 452, 454, 456, 458, 460, 462, 464, 466, 468, 470, 472, 474, 476, 478, 480, 482, 484, 486, 488, 490, 492, 494, 496, 498, 500, 502, 504, 506, 508, 510, 512, 514, 516, 518, 520, 522, 524, 526, 528, 530, 532, 534, 536, 538, 540, 542, 544, 546, 548, 550, 552, 554, 556, 558, 560, 562, 564, 566, 568, 570, 572, 574, 576, 578, 580, 582, 584, 586, 588, 590, 592, 594, 596, 598, 600, 602, 604, 606, 608, 610, 612, 614, 616, 618, 620, 622, 624, 626, 628, 630, 632, 634, 636, 638, 640, 642, 644, 646, 648, 650, 652, 654, 656, 658, 660, 662, 664, 666, 668, 670, 672, 674, 676, 748, 750, 752, 754, 756, 758, 760, 762, 764, 766, 768, 770, 772, 774, 776, 778, & 780;
(b) a polypeptide of SEQ ID NOS: 2, 4, 6, 8, 10, 12, 14, 16, 18, 20, 22, 24, 26, 28, 30, 32, 34, 36, 38, 40, 42, 44, 46, 48, 50, 52, 54, 56, 58, 60, 62, 64, 66, 68, 70, 72, 74, 76, 78, 80, 82, 84, 86, 88, 90, 92, 94, 96, 98, 100, 102, 104, 106, 108, 110, 112, 114, 116, 118, 120, 122, 124, 126, 128, 130, 132, 134, 136, 138, 140, 142, 144, 146, 148, 150, 152, 154, 156, 158, 160, 162, 164, 166, 168, 170, 172, 174, 176, 178, 180, 182, 184, 186, 188, 190, 192, 194, 196, 198, 200, 202, 204, 206, 208, 210, 212, 214, 216, 218, 220, 222, 224, 226, 228, 230, 232, 234, 236, 238, 240, 242, 244, 246, 248, 250, 252, 254, 256, 258, 260, 262, 264, 266, 268, 270, 272, 274, 276, 278, 280, 282, 284, 286, 288, 290, 292, 294, 296, 298, 300, 302, 304, 306, 308, 310, 312, 314, 316, 318, 320, 322, 324, 326, 328, 330, 332, 334, 336, 338, 340, 342, 344, 346, 348, 350, 352, 354, 356, 358, 360, 362, 364, 366, 368, 370, 372, 374, 376, 378, 380, 382, 384, 386, 388, 390, 392, 394, 396, 398, 400, 402, 404, 406, 408, 410, 412, 414, 416, 418, 420, 422, 424, 426, 428, 430, 432, 434, 436, 438, 440, 442, 444, 446, 448, 450, 452, 454, 456, 458, 460, 462, 464, 466, 468, 470, 472, 474, 476, 478, 480, 482, 484, 486, 488, 490, 492, 494, 496, 498, 500, 502, 504, 506, 508, 510, 512, 514, 516, 518, 520, 522, 524, 526, 528, 530, 532, 534, 536, 538, 540, 542, 544, 546, 548, 550, 552, 554, 556, 558, 560, 562, 564, 566, 568, 570, 572, 574, 576, 578, 580, 582, 584, 586, 588, 590, 592, 594, 596, 598, 600, 602, 604, 606, 608, 610, 612, 614, 616, 618, 620, 622, 624, 626, 628, 630, 632, 634, 636, 638, 640, 642, 644, 646, 648, 650, 652, 654, 656, 658, 660, 662, 664, 666, 668, 670, 672, 674, 676, 748, 750, 752, 754, 756, 758, 760, 762, 764, 766, 768, 770, 772, 774, 776, 778, & 780, capable of modulating an NF-κB response;
(c) a polypeptide domain of SEQ ID NOS: 2, 4, 6, 8, 10, 12, 14, 16, 18, 20, 22, 24, 26, 28, 30, 32, 34, 36, 38, 40, 42, 44, 46, 48, 50, 52, 54, 56, 58, 60, 62, 64, 66, 68, 70, 72, 74, 76, 78, 80, 82, 84, 86, 88, 90, 92, 94, 96, 98, 100, 102, 104, 106, 108, 110, 112, 114, 116, 118, 120, 122, 124, 126, 128, 130, 132, 134, 136, 138, 140, 142, 144, 146, 148, 150, 152, 154, 156, 158, 160, 162, 164, 166, 168, 170, 172, 174, 176, 178, 180, 182, 184, 186, 188, 190, 192, 194, 196, 198, 200, 202, 204, 206, 208, 210, 212, 214, 216, 218, 220, 222, 224, 226, 228, 230, 232, 234, 236, 238, 240, 242, 244, 246, 248, 250, 252, 254, 256, 258, 260, 262, 264, 266, 268, 270, 272, 274, 276, 278, 280, 282, 284, 286, 288, 290, 292, 294, 296, 298, 300, 302, 304, 306, 308, 310, 312, 314, 316, 318, 320, 322, 324, 326, 328, 330, 332, 334, 336, 338, 340, 342, 344, 346, 348, 350, 352, 354, 356, 358, 360, 362, 364, 366, 368, 370, 372, 374, 376, 378, 380, 382, 384, 386, 388, 390, 392, 394, 396, 398, 400, 402, 404, 406, 408, 410, 412, 414, 416, 418, 420, 422, 424, 426, 428, 430, 432, 434, 436, 438, 440, 442, 444, 446, 448, 450, 452, 454, 456, 458, 460, 462, 464, 466, 468, 470, 472, 474, 476, 478, 480, 482, 484, 486, 488, 490, 492, 494, 496, 498, 500, 502, 504, 506, 508, 510, 512, 514, 516, 518, 520, 522, 524, 526, 528, 530, 532, 534, 536, 538, 540, 542, 544, 546, 548, 550, 552, 554, 556, 558, 560, 562, 564, 566, 568, 570, 572, 574, 576, 578, 580, 582, 584, 586, 588, 590, 592, 594, 596, 598, 600, 602, 604, 606, 608, 610, 612, 614, 616, 618, 620, 622, 624, 626, 628, 630, 632, 634, 636, 638, 640, 642, 644, 646, 648, 650, 652, 654, 656, 658, 660, 662, 664, 666, 668, 670, 672, 674, 676, 748, 750, 752, 754, 756, 758, 760, 762, 764, 766, 768, 770, 772, 774, 776, 778, & 780;
(d) a polypeptide epitope of SEQ ID NOS: 2, 4, 6, 8, 10, 12, 14, 16, 18, 20, 22, 24, 26, 28, 30, 32, 34, 36, 38, 40, 42, 44, 46, 48, 50, 52, 54, 56, 58, 60, 62, 64, 66, 68, 70, 72, 74, 76, 78, 80, 82, 84, 86, 88, 90, 92, 94, 96, 98, 100, 102, 104, 106, 108, 110, 112, 114, 116, 118, 120, 122, 124, 126, 128, 130, 132, 134, 136, 138, 140, 142, 144, 146, -148, 150, 152, 154, 156, 158, 160, 162, 164, 166, 168, 170, 172, 174, 176, 178, 180, 182, 184, 186, 188, 190, 192, 194, 196, 198, 200, 202, 204, 206, 208, 210, 212, 214, 216, 218, 220, 222, 224, 226, 228, 230, 232, 234, 236, 238, 240, 242, 244, 246, 248, 250, 252, 254, 256, 258, 260, 262, 264, 266, 268, 270, 272, 274, 276, 278, 280, 282, 284, 286, 288, 290, 292, 294, 296, 298, 300, 302, 304, 306, 308, 310, 312, 314, 316, 318, 320, 322, 324, 326, 328, 330, 332, 334, 336, 338, 340, 342, 344, 346, 348, 350, 352, 354, 356, 358, 360, 362, 364, 366, 368, 370, 372, 374, 376, 378, 380, 382, 384, 386, 388, 390, 392, 394, 396, 398, 400, 402, 404, 406, 408, 410, 412, 414, 416, 418, 420, 422, 424, 426, 428, 430, 432, 434, 436, 438, 440, 442, 444, 446, 448, 450, 452, 454, 456, 458, 460, 462, 464, 466, 468, 470, 472, 474, 476, 478, 480, 482, 484, 486, 488, 490, 492, 494, 496, 498, 500, 502, 504, 506, 508, 510, 512, 514, 516, 518, 520, 522, 524, 526, 528, 530, 532, 534, 536, 538, 540, 542, 544, 546, 548, 550, 552, 554, 556, 558, 560, 562, 564, 566, 568, 570, 572, 574, 576, 578, 580, 582, 584, 586, 588, 590, 592, 594, 596, 598, 600, 602, 604, 606, 608, 610, 612, 614, 616, 618, 620, 622, 624, 626, 628, 630, 632, 634, 636, 638, 640, 642, 644, 646, 648, 650, 652, 654, 656, 658, 660, 662, 664, 666, 668, 670, 672, 674, 676, 748, 750, 752, 754, 756, 758, 760, 762, 764, 766, 768, 770, 772, 774, 776, 778, & 780;
(e) a full length protein of SEQ ID NOS: 2, 4, 6, 8, 10, 12, 14, 16, 18, 20, 22, 24, 26, 28, 30, 32, 34, 36, 38, 40, 42, 44, 46, 48, 50, 52, 54, 56, 58, 60, 62, 64, 66, 68, 70, 72, 74, 76, 78, 80, 82, 84, 86, 88, 90, 92, 94, 96, 98, 100, 102, 104, 106, 108, 110, 112, 114, 116, 118, 120, 122, 124, 126, 128, 130, 132, 134, 136, 138, 140, 142, 144, 146, 148, 150, 152, 154, 156, 158, 160, 162, 164, 166, 168, 170, 172, 174, 176, 178, 180, 182, 184, 186, 188, 190, 192, 194, 196, 198, 200, 202, 204, 206, 208, 210, 212, 214, 216, 218, 220, 222, 224, 226, 228, 230, 232, 234, 236, 238, 240, 242, 244, 246, 248, 250, 252, 254, 256, 258, 260, 262, 264, 266, 268, 270, 272, 274, 276, 278, 280, 282, 284, 286, 288, 290, 292, 294, 296, 298, 300, 302, 304, 306, 308, 310, 312, 314, 316, 318, 320, 322, 324, 326, 328, 330, 332, 334, 336, 338, 340, 342, 344, 346, 348, 350, 352, 354, 356, 358, 360, 362, 364, 366, 368, 370, 372, 374, 376, 378, 380, 382, 384, 386, 388, 390, 392, 394, 396, 398, 400, 402, 404, 406, 408, 410, 412, 414, 416, 418, 420, 422, 424, 426, 428, 430, 432, 434, 436, 438, 440, 442, 444, 446, 448, 450, 452, 454, 456, 458, 460, 462, 464, 466, 468, 470, 472, 474, 476, 478, 480, 482, 484, 486, 488, 490, 492, 494, 496, 498, 500, 502, 504, 506, 508, 510, 512, 514, 516, 518, 520, 522, 524, 526, 528, 530, 532, 534, 536, 538, 540, 542, 544, 546, 548, 550, 552, 554, 556, 558, 560, 562, 564, 566, 568, 570, 572, 574, 576, 578, 580, 582, 584, 586, 588, 590, 592, 594, 596, 598, 600, 602, 604, 606, 608, 610, 612, 614, 616, 618, 620, 622, 624, 626, 628, 630, 632, 634, 636, 638, 640, 642, 644, 646, 648, 650, 652, 654, 656, 658, 660, 662, 664, 666, 668, 670, 672, 674, 676, 748, 750, 752, 754, 756, 758, 760, 762, 764, 766, 768, 770, 772, 774, 776, 778, & 780;
(f) a variant of SEQ ID NOS: 2, 4, 6, 8, 10, 12, 14, 16, 18, 20, 22, 24, 26, 28, 30, 32, 34, 36, 38, 40, 42, 44, 46, 48, 50, 52, 54, 56, 58, 60, 62, 64, 66, 68, 70, 72, 74, 76, 78, 80, 82, 84, 86, 88, 90, 92, 94, 96, 98, 100, 102, 104, 106, 108, 110, 112, 114, 116, 118, 120, 122, 124, 126, 128, 130, 132, 134, 136, 138, 140, 142, 144, 146, 148, 150, 152, 154, 156, 158, 160, 162, 164, 166, 168, 170, 172, 174, 176, 178, 180, 182, 184, 186, 188, 190, 192, 194, 196, 198, 200, 202, 204, 206, 208, 210, 212, 214, 216, 218, 220, 222, 224, 226, 228, 230, 232, 234, 236, 238, 240, 242, 244, 246, 248, 250, 252, 254, 256, 258, 260, 262, 264, 266, 268, 270, 272, 274, 276, 278, 280, 282, 284, 286, 288, 290, 292, 294, 296, 298, 300, 302, 304, 306, 308, 310, 312, 314, 316, 318, 320, 322, 324, 326, 328, 330, 332, 334, 336, 338, 340, 342, 344, 346, 348, 350, 352, 354, 356, 358, 360, 362, 364, 366, 368, 370, 372, 374, 376, 378, 380, 382, 384, 386, 388, 390, 392, 394, 396, 398, 400, 402, 404, 406, 408, 410, 412, 414, 416, 418, 420, 422, 424, 426, 428, 430, 432, 434, 436, 438, 440, 442, 444, 446, 448, 450, 452, 454, 456, 458, 460, 462, 464, 466, 468, 470, 472, 474, 476, 478, 480, 482, 484, 486, 488, 490, 492, 494, 496, 498, 500, 502, 504, 506, 508, 510, 512, 514, 516, 518, 520, 522, 524, 526, 528, 530, 532, 534, 536, 538, 540, 542, 544, 546, 548, 550, 552, 554, 556, 558, 560, 562, 564, 566, 568, 570, 572, 574, 576, 578, 580, 582, 584, 586, 588, 590, 592, 594, 596, 598, 600, 602, 604, 606, 608, 610, 612, 614, 616, 618, 620, 622, 624, 626, 628, 630, 632, 634, 636, 638, 640, 642, 644, 646, 648, 650, 652, 654, 656, 658, 660, 662, 664, 666, 668, 670, 672, 674, 676, 748, 750, 752, 754, 756, 758, 760, 762, 764, 766, 768, 770, 772, 774, 776, 778, & 780;
(g) an allelic variant of SEQ ID NOS: 2, 4, 6, 8, 10, 12, 14, 16, 18, 20, 22, 24, 26, 28, 30, 32, 34, 36, 38, 40, 42, 44, 46, 48, 50, 52, 54, 56, 58, 60, 62, 64, 66, 68, 70, 72, 74, 76, 78, 80, 82, 84, 86, 88, 90, 92, 94, 96, 98, 100, 102, 104, 106, 108, 1 10, 112, 114, 116, 118, 120, 122, 124, 126, 128, 130, 132, 134, 136, 138, 140, 142, 144, 146, 148, 150, 152, 154, 156, 158, 160, 162, 164, 166, 168, 170, 172, 174, 176, 178, 180, 182, 184, 186, 188, 190, 192, 194, 196, 198, 200, 202, 204, 206, 208, 210, 212, 214, 216, 218, 220, 222, 224, 226, 228, 230, 232, 234, 236, 238, 240, 242, 244, 246, 248, 250, 252, 254, 256, 258, 260, 262, 264, 266, 268, 270, 272, 274, 276, 278, 280, 282, 284, 286, 288, 290, 292, 294, 296, 298, 300, 302, 304, 306, 308, 310, 312, 314, 316, 318, 320, 322, 324, 326, 328, 330, 332, 334, 336, 338, 340, 342, 344, 346, 348, 350, 352, 354, 356, 358, 360, 362, 364, 366, 368, 370, 372, 374, 376, 378, 380, 382, 384, 386, 388, 390, 392, 394, 396, 398, 400, 402, 404, 406, 408, 410, 412, 414, 416, 418, 420, 422, 424, 426, 428, 430, 432, 434, 436, 438, 440, 442, 444, 446, 448, 450, 452, 454, 456, 458, 460, 462, 464, 466, 468, 470, 472, 474, 476, 478, 480, 482, 484, 486, 488, 490, 492, 494, 496, 498, 500, 502, 504, 506, 508, 510, 512, 514, 516, 518, 520, 522, 524, 526, 528, 530, 532, 534, 536, 538, 540, 542, 544, 546, 548, 550, 552, 554, 556, 558, 560, 562, 564, 566, 568, 570, 572, 574, 576, 578, 580, 582, 584, 586, 588, 590, 592, 594, 596, 598, 600, 602, 604, 606, 608, 610, 612, 614, 616, 618, 620, 622, 624, 626, 628, 630, 632, 634, 636, 638, 640, 642, 644, 646, 648, 650, 652, 654, 656, 658, 660, 662, 664, 666, 668, 670, 672, 674, 676, 748, 750, 752, 754, 756, 758, 760, 762, 764, 766, 768, 770, 772, 774, 776, 778, & 780; and
(h) a species homologue of SEQ ID NOS: 2, 4, 6, 8, 10, 12, 14, 16, 18, 20, 22, 24, 26, 28, 30, 32, 34, 36, 38, 40, 42, 44, 46, 48, 50, 52, 54, 56, 58, 60, 62, 64, 66, 68, 70, 72, 74, 76, 78, 80, 82, 84, 86, 88, 90, 92, 94, 96, 98, 100, 102, 104, 106, 108, 110, 112, 114, 116, 118, 120, 122, 124, 126, 128, 130, 132, 134, 136, 138, 140, 142, 144, 146, 148, 150, 152, 154, 156, 158, 160, 162, 164, 166, 168, 170, 172, 174, 176, 178, 180, 182, 184, 186, 188, 190, 192, 194, 196, 198, 200, 202, 204, 206, 208, 210, 212, 214, 216, 218, 220, 222, 224, 226, 228, 230, 232, 234, 236, 238, 240, 242, 244, 246, 248, 250, 252, 254, 256, 258, 260, 262, 264, 266, 268, 270, 272, 274, 276, 278, 280, 282, 284, 286, 288, 290, 292, 294, 296, 298, 300, 302, 304, 306, 308, 310, 312, 314, 316, 318, 320, 322, 324, 326, 328, 330, 332, 334, 336, 338, 340, 342, 344, 346, 348, 350, 352, 354, 356, 358, 360, 362, 364, 366, 368, 370, 372, 374, 376, 378, 380, 382, 384, 386, 388, 390, 392, 394, 396, 398, 400, 402, 404, 406, 408, 410, 412, 414, 416, 418, 420, 422, 424, 426, 428, 430, 432, 434, 436, 438, 440, 442, 444, 446, 448, 450, 452, 454, 456, 458, 460, 462, 464, 466, 468, 470, 472, 474, 476, 478, 480, 482, 484, 486, 488, 490, 492, 494, 496, 498, 500, 502, 504, 506, 508, 510, 512, 514, 516, 518, 520, 522, 524, 526, 528, 530, 532, 534, 536, 538, 540, 542, 544, 546, 548, 550, 552, 554, 556, 558, 560, 562, 564, 566, 568, 570, 572, 574, 576, 578, 580, 582, 584, 586, 588, 590, 592, 594, 596, 598, 600, 602, 604, 606, 608, 610, 612, 614, 616, 618, 620, 622, 624, 626, 628, 630, 632, 634, 636, 638, 640, 642, 644, 646, 648, 650, 652, 654, 656, 658, 660, 662, 664, 666, 668, 670, 672, 674, 676, 748, 750, 752, 754, 756, 758, 760, 762, 764, 766, 768, 770, 772, 774, 776, 778, & 780.

7. The isolated polypeptide of claim 6, wherein the full length protein comprises sequential amino acid deletions from either the C-terminus or the N-terminus.

8. An isolated antibody that binds specifically to the isolated polypeptide of claim 6.

9. A method for preventing, treating, or ameliorating a medical condition, comprising administering to a mammalian subject a therapeutically effective amount of the polypeptide of claim 6.

10. A method of diagnosing a NF-κB associated condition or a susceptibility to a NF-κB associated condition in a subject wherein said condition is a member of the group consisting of an immune disorder; an inflammatory disorder in which polypeptides of the present invention are associated with the disorder either directly; or indirectly; an inflammatory disorder related to aberrant NF-κB regulation; a cancer; aberrant apoptosis; hepatic disorders; Hodgkins lymphomas; hematopoietic tumors; hyper-IgM syndromes; hypohydrotic ectodermal dysplasia; X-linked anhidrotic ectodermal dysplasia; Immunodeficiency; al incontinentia pigmenti; viral infections; HIV-1; HTLV-1; hepatitis B; hepatitis C; EBV; influenza; viral replication; host cell survival; and evasion of immune responses; rheumatoid arthritis inflammatory bowel disease; colitis; asthma; atherosclerosis; cachexia; euthyroid sick syndrome; stroke; EAE; autoimmune disorders; disorders related to hyper immune activity; disorders related to aberrant acute phase responses; hypercongenital conditions; birth defects; necrotic lesions; wounds; organ transplant rejection; conditions related to organ transplant rejection; disorders related to aberrant signal transduction; proliferating disorders; cancers; and HIV propagation in cells infected with other viruses; comprising:
(a) determining the presence or absence of a mutation in the polynucleotide of claim 1; and
(b) diagnosing a NF-κB associated condition or a susceptibility to a NF-κB associated condition based on the presence or absence of said mutation, wherein said mutation indicates a predisposition to at least one of said NF-κB associated disorders

11. A method of diagnosing an NF-κB associated condition or a susceptibility to a NF-κB associated condition in a subject wherein said condition is a member of the group consisting of an immune disorder; an inflammatory disorder in which polypeptides of the present invention are associated with the disorder either directly, or indirectly; an inflammatory disorder related to aberrant NF-κB regulation; a cancer; aberrant apoptosis; hepatic disorders; Hodgkins lymphomas; hematopoietic tumors; hyper-IgM syndromes; hypohydrotic ectodermal dysplasia; X-linked anhidrotic ectodermal dysplasia; Immunodeficiency; al incontinentia pigmenti; viral infections; HIV-1; HTLV-1; hepatitis B; hepatitis C; EBV; influenza; viral replication; host cell survival; and evasion of immune responses; rheumatoid arthritis inflammatory bowel disease; colitis; asthma; atherosclerosis; cachexia; euthyroid sick syndrome; stroke; EAE; autoimmune disorders; disorders related to hyper immune activity; disorders related to aberrant acute phase responses; hypercongenital conditions; birth defects; necrotic lesions; wounds; organ transplant rejection; conditions related to organ transplant rejection; disorders related to aberrant signal transduction; proliferating disorders; cancers; and HIV propagation in cells infected with other viruses, comprising:
(a) determining the presence or amount of expression of the polypeptide of claim 6 in a biological sample; and
(b) diagnosing a NF-κB associated condition or a susceptibility to a pathological condition based on the presence or amount of expression of the polypeptide.

12. A method for identifing a binding partner to the polypeptide of claim 6 comprising:
(a) contacting the polypeptide of claim 6 with a binding partner; and
(b) determining whether the binding partner effects an activity of the polypeptide.

13. The method for preventing, treating, or ameliorating a medical condition of claim 9, wherein the medical condition is a member of the group consisting of an immune disorder; an inflammatory disorder in which polypeptides of the present invention are associated with the disorder either directly; or indirectly; an inflammatory disorder related to aberrant NF-κB regulation; a cancer; aberrant apoptosis; hepatic disorders; Hodgkins lymphomas; hematopoietic tumors; hyper-IgM syndromes; hypohydrotic ectodermal dysplasia; X-linked anhidrotic ectodermal dysplasia; Immunodeficiency; al incontinentia pigmenti; viral infections; HIV-1; HTLV-1; hepatitis B; hepatitis C; EBV; influenza; viral replication; host cell survival; and evasion of immune responses; rheumatoid arthritis inflammatory bowel disease; colitis; asthma; atherosclerosis; cachexia; euthyroid sick syndrome; stroke; EAE; autoimmune disorders; disorders related to hyper immune activity; disorders related to aberrant acute phase responses; hypercongenital conditions; birth defects; necrotic lesions; wounds; organ transplant rejection; conditions related to organ transplant rejection; disorders related to aberrant signal transduction; proliferating disorders; cancers; and HIV propagation in cells infected with other viruses, comprising administering an effect amount of a modulator of a polypeptide selected from the group consisting of: SEQ ID NOS: 2, 4, 6, 8, 10, 12, 14, 16, 18, 20, 22, 24, 26, 28, 30, 32, 34, 36, 38, 40, 42, 44, 46, 48, 50, 52, 54, 56, 58, 60, 62, 64, 66, 68, 70, 72, 74, 76, 78, 80, 82, 84, 86, 88, 90, 92, 94, 96, 98, 100, 102, 104, 106, 108, 110, 112, 114, 116, 118, 120, 122, 124, 126, 128, 130, 132, 134, 136, 138, 140, 142, 144, 146, 148, 150, 152, 154, 156, 158, 160, 162, 164, 166, 168, 170, 172, 174, 176, 178, 180, 182, 184, 186, 188, 190, 192, 194, 196, 198, 200, 202, 204, 206, 208, 210, 212, 214, 216, 218, 220, 222, 224, 226, 228, 230, 232, 234, 236, 238, 240, 242, 244, 246, 248, 250, 252, 254, 256, 258, 260, 262, 264, 266, 268, 270, 272, 274, 276, 278, 280, 282, 284, 286, 288, 290, 292, 294, 296, 298, 300, 302, 304, 306, 308, 310, 312, 314, 316, 318, 320, 322, 324, 326, 328, 330, 332, 334, 336, 338, 340, 342, 344, 346, 348, 350, 352, 354, 356, 358, 360, 362, 364, 366, 368, 370, 372, 374, 376, 378, 380, 382, 384, 386, 388, 390, 392, 394, 396, 398, 400, 402, 404, 406, 408, 410, 412, 414, 416, 418, 420, 422, 424, 426, 428, 430, 432, 434, 436, 438, 440, 442, 444, 446, 448, 450, 452, 454, 456, 458, 460, 462, 464, 466, 468, 470, 472, 474, 476, 478, 480, 482, 484, 486, 488, 490, 492, 494, 496, 498, 500, 502, 504, 506, 508, 510, 512, 514, 516, 518, 520, 522, 524, 526, 528, 530, 532, 534, 536, 538, 540, 542, 544, 546, 548, 550, 552, 554, 556, 558, 560, 562, 564, 566, 568, 570, 572, 574, 576, 578, 580, 582, 584, 586, 588, 590, 592, 594, 596, 598, 600, 602, 604, 606, 608, 610, 612, 614, 616, 618, 620, 622, 624, 626, 628, 630, 632, 634, 636, 638, 640, 642, 644, 646, 648, 650, 652, 654, 656, 658, 660, 662, 664, 666, 668, 670, 672, 674, 676, 748, 750, 752, 754, 756, 758, 760, 762, 764, 766, 768, 770, 772, 774, 776, 778, & 780, to treat, ameliorate, or detect said disorder.

14. A method of identifying a compound that modulates the biological activity of a NF-κB associated molecule, comprising:
(a) combining a candidate modulator compound with a NF-κB associated molecule having the sequence set forth in a member of the group consisting of SEQ ID NOS: 2, 4, 6, 8, 10, 12, 14, 16, 18, 20, 22, 24, 26, 28, 30, 32, 34, 36, 38, 40, 42, 44, 46, 48, 50, 52, 54, 56, 58, 60, 62, 64, 66, 68, 70, 72, 74, 76, 78, 80, 82, 84, 86, 88, 90, 92, 94, 96, 98, 100, 102, 104, 106, 108, 110, 112, 114, 116, 118, 120, 122, 124, 126, 128, 130, 132, 134, 136, 138, 140, 142, 144, 146, 148, 150, 152, 154, 156, 158, 160, 162, 164, 166, 168, 170, 172, 174, 176, 178, 180, 182, 184, 186, 188, 190, 192, 194, 196, 198, 200, 202, 204, 206, 208, 210, 212, 214, 216, 218, 220, 222, 224, 226, 228, 230, 232, 234, 236, 238, 240, 242, 244, 246, 248, 250, 252, 254, 256, 258, 260, 262, 264, 266, 268, 270, 272, 274, 276, 278, 280, 282, 284, 286, 288, 290, 292, 294, 296, 298, 300, 302, 304, 306, 308, 310, 312, 314, 316, 318, 320, 322, 324, 326, 328, 330, 332, 334, 336, 338, 340, 342, 344, 346, 348, 350, 352, 354, 356, 358, 360, 362, 364, 366, 368, 370, 372, 374, 376, 378, 380, 382, 384, 386, 388, 390, 392, 394, 396, 398, 400, 402, 404, 406, 408, 410, 412, 414, 416, 418, 420, 422, 424, 426, 428, 430, 432, 434, 436, 438, 440, 442, 444, 446, 448, 450, 452, 454, 456, 458, 460, 462, 464, 466, 468, 470, 472, 474, 476, 478, 480, 482, 484, 486, 488, 490, 492, 494, 496, 498, 500, 502, 504, 506, 508, 510, 512, 514, 516, 518, 520, 522, 524, 526, 528, 530, 532, 534, 536, 538, 540, 542, 544, 546, 548, 550, 552, 554, 556, 558, 560, 562, 564, 566, 568, 570, 572, 574, 576, 578, 580, 582, 584, 586, 588, 590, 592, 594, 596, 598, 600, 602, 604, 606, 608, 610, 612, 614, 616, 618, 620, 622, 624, 626, 628, 630, 632, 634, 636, 638, 640, 642, 644, 646, 648, 650, 652, 654, 656, 658, 660, 662, 664, 666, 668, 670, 672, 674, 676, 748, 750, 752, 754, 756, 758, 760, 762, 764, 766, 768, 770, 772, 774, 776, 778, & 780, or a polypeptide encoded by a polynucleotide selected from the group consisting of (SEQ ID NOS: 1, 3, 5, 7, 9, 11, 13, 15, 17, 19, 21, 23, 25, 27, 29, 31, 33, 35, 37, 39, 41, 43, 45, 47, 49, 51, 53, 55, 57, 59, 61, 63, 65, 67, 69, 71, 73, 75, 77, 79, 81, 83, 85, 87, 89, 91, 93, 95, 97, 99, 101, 103, 105, 107, 109, 111, 113, 115, 117, 119, 121, 123, 125, 127, 129, 131, 133, 135, 137, 139, 141, 143, 145, 147, 149, 151, 153, 155, 157, 159, 161, 163, 165, 167, 169, 171, 173, 175, 177, 179, 181, 183, 185, 187, 189, 191, 193, 195, 197, 199, 201, 203, 205, 207, 209, 211, 213, 215, 217, 219, 221, 223, 225, 227, 229, 231, 233, 235, 237, 239, 241, 243, 245, 247, 249, 251, 253, 255, 257, 259, 261, 263, 265, 267, 269, 271, 273, 275, 277, 279, 281, 283, 285, 287, 289, 291, 293, 295, 297, 299, 301, 303, 305, 307, 309, 311, 313, 315, 317, 319, 321, 323, 325, 327, 329, 331, 333, 335, 337, 339, 341, 343, 345, 347, 349, 351, 353, 355, 357, 359, 361, 363, 365, 367, 369, 371, 373, 375, 377, 379, 381, 383, 385, 387, 389, 391, 393, 395, 397, 399, 401, 403, 405, 407, 409, 411, 413, 415, 417, 419, 421, 423, 425, 427, 429, 431, 433, 435, 437, 439, 441, 443, 444, 446, 448, 450, 452, 454, 456, 458, 459, 461, 463, 465, 467, 469, 471, 473, 475, 477, 479, 481, 483, 485, 487, 489, 491, 493, 495, 497, 499, 501, 503, 505, 507, 509, 511, 513, 515, 517, 519, 521, 523, 525, 527, 529, 530, 532, 533, 535, 537, 539, 541, 543, 545, 547, 549, 551, 553, 555, 557, 559, 561, 563, 565, 567, 569, 571, 573, 575, 577, 579, 581, 583, 585, 587, 589, 591, 593, 595, 597, 599, 601, 603, 605, 607, 609, 611, 612, 614, 616, 618, 620, 622, 624, 626, 628, 630, 632, 634, 636, 638, 639, 641, 643, 645, 647, 649, 651, 653, 655, 657, 659, 661, 663, 665, 667, 669, 671, 673, 675, 747, 749, 751, 753, 755, 757, 759, 761, 763, 765, 767, 769, 771, 773, 775, 777, 779 & 823); and
(b) measuring an effect of the candidate modulator compound on the activity of the NF-κB associated molecule.

15. A method of identifying a compound that modulates the biological activity of an NF-κB associated molecule, comprising:
(a) combining a candidate modulator compound with a host cell expressing a NF-κB associated molecule having the sequence as set forth in a member of the group consisting of SEQ ID NOS: 2, 4, 6, 8, 10, 12, 14, 16, 18, 20, 22, 24, 26, 28, 30, 32, 34, 36, 38, 40, 42, 44, 46, 48, 50, 52, 54, 56, 58, 60, 62, 64, 66, 68, 70, 72, 74, 76, 78, 80, 82, 84, 86, 88, 90, 92, 94, 96, 98, 100, 102, 104, 106, 108, 110, 112, 114, 116, 118, 120, 122, 124, 126, 128, 130, 132, 134, 136, 138, 140, 142, 144, 146, 148, 150, 152, 154, 156, 158, 160, 162, 164, 166, 168, 170, 172, 174, 176, 178, 180, 182, 184, 186, 188, 190, 192, 194, 196, 198, 200, 202, 204, 206, 208, 210, 212, 214, 216, 218, 220, 222, 224, 226, 228, 230, 232, 234, 236, 238, 240, 242, 244, 246, 248, 250, 252, 254, 256, 258, 260, 262, 264, 266, 268, 270, 272, 274, 276, 278, 280, 282, 284, 286, 288, 290, 292, 294, 296, 298, 300, 302, 304, 306, 308, 310, 312, 314, 316, 318, 320, 322, 324, 326, 328, 330, 332, 334, 336, 338, 340, 342, 344, 346, 348, 350, 352, 354, 356, 358, 360, 362, 364, 366, 368, 370, 372, 374, 376, 378, 380, 382, 384, 386, 388, 390, 392, 394, 396, 398, 400, 402, 404, 406, 408, 410, 412, 414, 416, 418, 420, 422, 424, 426, 428, 430, 432, 434, 436, 438, 440, 442, 444, 446, 448, 450, 452, 454, 456, 458, 460, 462, 464, 466, 468, 470, 472, 474, 476, 478, 480, 482, 484, 486, 488, 490, 492, 494, 496, 498, 500, 502, 504, 506, 508, 510, 512, 514, 516, 518, 520, 522, 524, 526, 528, 530, 532, 534, 536, 538, 540, 542, 544, 546, 548, 550, 552, 554, 556, 558, 560, 562, 564, 566, 568, 570, 572, 574, 576, 578, 580, 582, 584, 586, 588, 590, 592, 594, 596, 598, 600, 602, 604, 606, 608, 610, 612, 614, 616, 618, 620, 622, 624, 626, 628, 630, 632, 634, 636, 638, 640, 642, 644, 646, 648, 650, 652, 654, 656, 658, 660, 662, 664, 666, 668, 670, 672, 674, 676, 748, 750, 752, 754, 756, 758, 760, 762, 764, 766, 768, 770, 772, 774, 776, 778, & 780, or a polypeptide encoded by a polynucleotide selected from the group consisting of (SEQ ID NOS: 1, 3, 5, 7, 9, 11, 13, 15, 17, 19, 21, 23, 25, 27, 29, 31, 33, 35, 37, 39, 41, 43, 45, 47, 49, 51, 53, 55, 57, 59, 61, 63, 65, 67, 69, 71, 73, 75, 77, 79, 81, 83, 85, 87, 89, 91, 93, 95, 97, 99, 101, 103, 105, 107, 109, 111, 113, 115, 117, 119, 121, 123, 125, 127, 129, 131, 133, 135, 137, 139, 141, 143, 145, 147, 149, 151, 153, 155, 157, 159, 161, 163, 165, 167, 169, 171, 173, 175, 177, 179, 181, 183, 185, 187, 189, 191, 193, 195, 197, 199, 201, 203, 205, 207, 209, 211, 213, 215, 217, 219, 221, 223, 225, 227, 229, 231, 233, 235, 237, 239, 241, 243, 245, 247, 249, 251, 253, 255, 257, 259, 261, 263, 265, 267, 269, 271, 273, 275, 277, 279, 281, 283, 285, 287, 289, 291, 293, 295, 297, 299, 301, 303, 305, 307, 309, 311, 313, 315, 317, 319, 321, 323, 325, 327, 329, 331, 333, 335, 337, 339, 341, 343, 345, 347, 349, 351, 353, 355, 357, 359, 361, 363, 365, 367, 369, 371, 373, 375, 377, 379, 381, 383, 385, 387, 389, 391, 393, 395, 397, 399, 401, 403, 405, 407, 409, 411, 413, 415, 417, 419, 421, 423, 425, 427, 429, 431, 433, 435, 437, 439, 441, 443, 444, 446, 448, 450, 452, 454, 456, 458, 459, 461, 463, 465, 467, 469, 471, 473, 475, 477, 479, 481, 483, 485, 487, 489, 491, 493, 495, 497, 499, 501, 503, 505, 507, 509, 511, 513, 515, 517, 519, 521, 523, 525, 527, 529, 530, 532, 533, 535, 537, 539, 541, 543, 545, 547, 549, 551, 553, 555, 557, 559, 561, 563, 565, 567, 569, 571, 573, 575, 577, 579, 581, 583, 585, 587, 589, 591, 593, 595, 597, 599, 601, 603, 605, 607, 609, 611, 612, 614, 616, 618, 620, 622, 624, 626, 628, 630, 632, 634, 636, 638, 639, 641, 643, 645, 647, 649, 651, 653, 655, 657, 659, 661, 663, 665, 667, 669, 671, 673, 675, 747, 749, 751, 753, 755, 757, 759, 761, 763, 765, 767, 769, 771, 773, 775, 777, 779 & 823); and
(b) measuring an effect of the candidate modulator compound on the activity of the expressed NF-κB associated molecule.

16. A method of identifying a compound that modulates the biological activity of a NF-κB associated molecule, comprising:
(a) combining a candidate modulator compound with a host cell containing a vector comprising the polynucleotide sequence selected from the group consisting of (SEQ ID NOS: 1, 3, 5, 7, 9, 11, 13, 15, 17, 19, 21, 23, 25, 27, 29, 31, 33, 35, 37, 39, 41, 43, 45, 47, 49, 51, 53, 55, 57, 59, 61, 63, 65, 67, 69, 71, 73, 75, 77, 79, 81, 83, 85, 87, 89, 91, 93, 95, 97, 99, 101, 103, 105, 107, 109, 111, 113, 115, 117, 119, 121, 123, 125, 127, 129, 131, 133, 135, 137, 139, 141, 143, 145, 147, 149, 151, 153, 155, 157, 159, 161, 163, 165, 167, 169, 171, 173, 175, 177, 179, 181, 183, 185, 187, 189, 191, 193, 195, 197, 199, 201, 203, 205, 207, 209, 211, 213, 215, 217, 219, 221, 223, 225, 227, 229, 231, 233, 235, 237, 239, 241, 243, 245, 247, 249, 251, 253, 255, 257, 259, 261, 263, 265, 267, 269, 271, 273, 275, 277, 279, 281, 283, 285, 287, 289, 291, 293, 295, 297, 299, 301, 303, 305, 307, 309, 311, 313, 315, 317, 319, 321, 323, 325, 327, 329, 331, 333, 335, 337, 339, 341, 343, 345, 347, 349, 351, 353, 355, 357, 359, 361, 363, 365, 367, 369, 371, 373, 375, 377, 379, 381, 383, 385, 387, 389, 391, 393, 395, 397, 399, 401, 403, 405, 407, 409, 411, 413, 415, 417, 419, 421, 423, 425, 427, 429, 431, 433, 435, 437, 439, 441, 443, 444, 446, 448, 450, 452, 454, 456, 458, 459, 461, 463, 465, 467, 469, 471, 473, 475, 477, 479, 481, 483, 485, 487, 489, 491, 493, 495, 497, 499, 501, 503, 505, 507, 509, 511, 513, 515, 517, 519, 521, 523, 525, 527, 529, 530, 532, 533, 535, 537, 539, 541, 543, 545, 547, 549, 551, 553, 555, 557, 559, 561, 563, 565, 567, 569, 571, 573, 575, 577, 579, 581, 583, 585, 587, 589, 591, 593, 595, 597, 599, 601, 603, 605, 607, 609, 611, 612, 614, 616, 618, 620, 622, 624, 626, 628, 630, 632, 634, 636, 638, 639, 641, 643, 645, 647, 649, 651, 653, 655, 657, 659, 661, 663, 665, 667, 669, 671, 673, 675, 747, 749, 751, 753, 755, 757, 759, 761, 763, 765, 767, 769, 771, 773, 775, 777, 779 & 823); wherein a NF-κB associated molecule is expressed by the cell; and
(b) measuring an effect of the candidate modulator compound on the activity of the expressed NF-κB associated molecule.

17. A method of screening for a compound that is capable of modulating the biological activity of a NF-κB associated molecule, comprising the steps of:
(a) providing a host cell containing a vector comprising the polynucleotide sequence selected from the group consisting of (SEQ ID NOS: 1, 3, 5, 7, 9, 11, 13, 15, 17, 19, 21, 23, 25, 27, 29, 31, 33, 35, 37, 39, 41, 43, 45, 47, 49, 51, 53, 55, 57, 59, 61, 63, 65, 67, 69, 71, 73, 75, 77, 79, 81, 83, 85, 87, 89, 91, 93, 95, 97, 99, 101, 103, 105, 107, 109, 111, 113, 115, 117, 119, 121, 123, 125, 127, 129, 131, ′ 133, 135, 137, 139, 141, 143, 145, 147, 149, 151, 153, 155, 157, 159, 161, 163, 165, 167, 169, 171, 173, 175, 177, 179, 181, 183, 185, 187, 189, 191, 193, 195, 197, 199, 201, 203, 205, 207, 209, 211, 213, 215, 217, 219, 221, 223, 225, 227, 229, 231, 233, 235, 237, 239, 241, 243, 245, 247, 249, 251, 253, 255, 257, 259, 261, 263, 265, 267, 269, 271, 273, 275, 277, 279, 281, 283, 285, 287, 289, 291, 293, 295, 297, 299, 301, 303, 305, 307, 309, 311, 313, 315, 317, 319, 321, 323, 325, 327, 329, 331, 333, 335, 337, 339, 341, 343, 345, 347, 349, 351, 353, 355, 357, 359, 361, 363, 365, 367, 369, 371, 373, 375, 377, 379, 381, 383, 385, 387, 389, 391, 393, 395, 397, 399, 401, 403, 405, 407, 409, 411, 413, 415, 417, 419, 421, 423, 425, 427, 429, 431, 433, 435, 437, 439, 441, 443, 444, 446, 448, 450, 452, 454, 456, 458, 459, 461, 463, 465, 467, 469, 471, 473, 475, 477, 479, 481, 483, 485, 487, 489, 491, 493, 495, 497, 499, 501, 503, 505, 507, 509, 511, 513, 515, 517, 519, 521, 523, 525, 527, 529, 530, 532, 533, 535, 537, 539, 541, 543, 545, 547, 549, 551, 553, 555, 557, 559, 561, 563, 565, 567, 569, 571, 573, 575, 577, 579, 581, 583, 585, 587, 589, 591, 593, 595, 597, 599, 601, 603, 605, 607, 609, 611, 612, 614, 616, 618, 620, 622, 624, 626, 628, 630, 632, 634, 636, 638, 639, 641, 643, 645, 647, 649, 651, 653, 655, 657, 659, 661, 663, 665, 667, 669, 671, 673, 675, 747, 749, 751, 753, 755, 757, 759, 761, 763, 765, 767, 769, 771, 773, 775, 777, 779 & 823);
(b) determining the biological activity of the NFκRB associated molecule in the absence of a modulator compound;
(c) contacting the cell with the modulator compound; and
(d) determining the biological activity of the NF-κB associated molecule in the presence of the modulator compound; wherein a difference between the activity of the NF-κB associated molecule in the presence of the modulator compound and in the absence of the modulator compound indicates a modulating effect of the compound.

18. A compound that modulates the biological activity of a human NF-κB associated molecule as identified by the method according to a member of the group consisting of: the compound(s) identified according to the method of claim 14; the compound(s) identified according to the method of claim 15; the compound(s) identified according to the method of claim 16; and the compound(s) identified according to the method of claim 17.

The application's sequence listing, which the Patent Office published only in electronic form, follows.

SEQUENCE LISTING (823 sequences)

SEQ ID NO: 1 - DNA, 1834 bp, Homo sapiens
atttttagataatcattaaagaccacagaaaatgtaacagatcctactcttcaaaataattgctattcagtattaaaacgagcagtcagctgcgtgattcccgtgattgcgttacaagctttgtctccttcgacttggagtctttgtccaggacgatgagacactcaaagagaacttactgtcctgattgggatgacaaggattgggattatggaaaatggaggagcagcagcagtcataaaagaaggaagagatcacatagcagtgcccaggagaacaagcgctgcaaatacaatcactctaaaatgtgtgatagccattatttggaaagcaggtctataaatgagaaagattatcatagtcgacgctacattgatgagtacagaaatgactacactcaaggatgtgaacctggacatcgccaaagagaccatgaaagccggtatcagaaccatagtagcaagtcttctggtagaagtggaagaagtagttataaaagcaaacacaggattcaccacagtacttcacatcgtcgttcacatgggaagagtcaccgaaggaaaagaaccaggagtgtagaggatgatgaggagggtcacctgatctgtcagagtggagacgtactaagtgcaagatatgaaattgttgatactttaggtgaaggagcttttggaaaagttgtggagtgcatcgatcataaagcgggaggtagacatgtagcagtaaaaatagttaaaaatgtggatagatactgtgaagctgctcgctcagaaatacaagttctggaacatctgaatacaacagaccccaacagtactttccgctgtgtccagatgttggaatggtttgagcatcatggtcacatttgcattgtttttgaactattgggacttagtacttacgacttcattaaagaaaatggttttctaccatttcgactggatcatatcagaaagatggcatatcagatatgcaagtctgtgaattttttgcacagtaataagttgactcacacagacttaaagcctgaaaacatcttatttgtgcagtctgactacacagaggcgtataatcccaaaataaaacgtgatgaacgcaccttaataaatccagatattaaagttgtagactttggtagtgcaacatatgatgacgaacatcacagtacattggtatctacaagacattatagagcacctgaagttattttagccctagggtggtcccaaccatgtgatgtctggagcataggatgcattcttattgaatactatcttgggtttaccgtatttccaacacacgatagtaaggagcatttagcaatgatggaaaggattcttggacctctaccaaaacatatgatacagaaaaccaggaaacgtaaatattttcaccacgatcgattagactgggatgaacacagttctgccggcagatatgtttcaagagcctgtaaacctctgaaggaatttatgctttctcaagatgttgaacatgagcgtctctttgacctcattcagaaaatgttggagtatgatccagccaaaagaattactctcagagaagccttaaagcatcctttctttgaccttctgaagaaaagtatatagatctgtaattggacagctctctcgaagagatcttacagactgtatcagtctaatttttaaattttaagttattttgtacagctttgtaaattcttaacatttttatattgccatgtttattttgtttgggtaatttggttcattaagtacatagctaaggtaatgaacatctttttcagtaattgtaaagtgatttattcagaataaattttttgtgcttatga

SEQ ID NO: 2 - protein, 484 aa, Homo sapiens
MRHSKRTYCPDWDDKDWDYGKWRSSSSHKRRKRSHSSAQENKRCKYNHSKMCDSHYLESRSINEKDYHSRRYIDEYRNDYTQGCEPGHRQRDHESRYQNHSSKSSGRSGRSSYKSKHRIHHSTSHRRSHGKSHRRKRTRSVEDDEEGHLICQSGDVLSARYEIVDTLGEGAFGKVVECIDHKAGGRHVAVKIVKNVDRYCEAARSEIQVLEHLNTTDPNSTFRCVQMLEWFEHHGHICIVFELLGLSTYDFIKENGFLPFRLDHIRKMAYQICKSVNFLHSNKLTHTDLKPENILFVQSDYTEAYNPKIKRDERTLINPDIKVVDFGSATYDDEHHSTLVSTRHYRAPEVILALGWSQPCDVWSIGCILIEYYLGFTVFPTHDSKEHLAMMERILGPLPKHMIQKTRKRKYFHHDRLDWDEHSSAGRYVSRACKPLKEFMLSQDVEHERLFDLIQKMLEYDPAKRITLREALKHPFFDLLKKSI

SEQ ID NO: 3 - DNA, 2378 bp, Homo sapiens
ggcacgaggcctgggcgccagcgcagcgtagcaaatccaggcagcgccacgcgcggccggggccgggcggaaccgagaagccgggaccgcgctgcgacgcgccggccgcatggagcctgccgccggtttcctgtctccgcgccccttccagcgtgcggccgccgcgcccgctcccccggccgggcccgggccgcctccgagtgccttgcgcggacctgagctggagatgctggccgggctaccgacgtcagaccccgggcgcctcatcacggacccgcgcagcggccgcacctacctcaaaggccgcttgttgggcaaggggggcttcgcccgctgctacgaggccactgacacagagactggcagcgcctacgctgtcaaagtcatcccgcagagccgcgtcgccaagccgcatcagcgcgagaagatcctaaatgagattgagctgcaccgagacctgcagcaccgccacatcgtgcgtttttcgcaccactttgaggacgctgacaacatctacattttcttggagctctgcagccgaaagtccctggcccacatctggaaggcccggcacaccctgttggagccagaagtgcgctactacctgcggcagatcctttctggcctcaagtacttgcaccagcgcggcatcttgcaccgggacctcaagttgggaaattttttcatcactgagaacatggaactgaaggtgggggattttgggctggcagcccggttggagcctccggagcagaggaagaagaccatctgtggcacccccaactatgtggctccagaagtgctgctgagacagggccacggccctgaggcggatgtatggtcactgggctgtgtcatgtacacgctgctctgcgggagccctccctttgagacggctgacctgaaggagacgtaccgctgcatcaagcaggttcactacacgctgcctgccagcctctcactgcctgcccggcagctcctggccgccatccttcgggcctcaccccgagaccgcccctctattgaccagatcctgcgccatgacttctttaccaagggctacacccccgatcgactccctatcagcagctgcgtgacagtcccagacctgacaccccccaacccagctaggagtctgtttgccaaagttaccaagagcctctttggcagaaagaagaagagtaagaatcatgcccaggagagggatgaggtctccggtttggtgagcggcctcatgcgcacatccgttggccatcaggatgccaggccagaggctccagcagcttctggcccagcccctgtcagcctggtagagacagcacctgaagacagctcaccccgtgggacactggcaagcagtggagatggatttgaagaaggtctgactgtggccacagtagtggagtcagccctttgtgctctgagaaattgtatagccttcatgcccccagcggaacagaacccggcccccctggcccagccagagcctctggtgtgggtcagcaagtgggttgactactccaataagttcggctttgggtatcaactgtccagccgccgtgtggctgtgctcttcaacaatggcacacatatggccctgtcggccaacagaaagactgtgcactacaatcccaccagcacaaagcacttctccttctccgtgggtgctgtgccccgggccctgcagcctcagctgggtatcctgcggtacttcgcctcctacatggagcagcacctcatgaagggtggagatctgcccagtgtggaagaggtagaggtacctgctccgcccttgctgctgcagtgggtcaagacggatcaggctctcctcatgctgtttagtgatggcactgtccaggtgaacttctacggggaccacaccaagctgattctcagtggctgggagcccctccttgtgacttttgtggcccgaaatcgtagtgcttgtacttacctcgcttcccaccttcggcagctgggctgctctccagacctgcggcagcgactccgctatgctctgcgcctgctccgggaccgcagcccagcctaggacccaagccctgaggcctgaggcctgtgcctgtcaggctctggcccttgcctttgtggccttcccccttcctttggtgcctcactgggggctttgggccgaatcccccagggaatcagggaccagctttactggagttgggggcggcttgtcttcgctggctcctaccccatctccaagataagcctgagccttagctcccagctagggggcgttatttatggaccacttttatttattgtcagacacttatttattgggatgtgagccccaggggggcctcctcctaggataataaacaattttgcagaaaaaaaaaaaaaaaaaa

SEQ ID NO: 4 - protein, 646 aa, Homo sapiens [sequence omitted]

SEQ ID NO: 5 - DNA, 3685 bp, Homo sapiens
ggcacgaggattttactgctgtctcaagatcagattattactgtagagaagatttttattttttgtttcattaacagattattataaagcaaaaagcatgcagaaaaagaagcagacgttttacattgggaattaatgaaagcgtgtctgctagttttgggtaggagaactgggaagttgttgcttaaaattttatatcacctccacaaacaaaactcttcggaaatggtaaaataagaaaatgcatgattctagaggcattcctaagcacccacgtgtcaggctttgtggtgtctgtggtatcatccgaccgtttggactggttagggcttactgagagctccatttctggaaagccttacaagactgaggaatatcagactgcgaatcaccgggaacggttcctttgcagcacagaagcaatctctctccccatcttcgcatattctgatggcaaaacaagtggaagaaaagaggaagcatgactgcagatcagatcagttctctttgtggattatattttcagtaaaatgtatggatctatcttttccttgttcttatatctagatcatgagacttgactgaggctgtatccttatcctccatccatctatggcgaactatagccatgcagctgacaacattttgcaaaatctctcgcctctaacagcctttctgaaactgacttccttgggtttcataataggagtcagcgtggtgggcaacctcctgatctccattttgctagtgaaagataagaccttgcatagagcaccttactacttcctgttggatctttgctgttcagatatcctcagatctgcaatttgtttcccatttgtgttcaactctgtcaaaaatggctctacctggacttatgggactctgacttgcaaagtgattgcctttctgggggttttgtcctgtttccacactgctttcatgctcttctgcatcagtgtcaccagatacttagctatcgcccatcaccgcttctatacaaagaggctgaccttttggacgtgtctggctgtgatctgtatggtgtggactctgtctgtggccatggcatttcccccggttttagacgtgggcacttactcattcattagggaggaagatcaatgcaccttccaacaccgctccttcagggctaatgattccttaggatttatgctgcttcttgctctcatcctcctagccacacagcttgtctacctcaagctgatatttttcgtccacgatcgaagaaaaatgaagccagtccagtttgtagcagcagtcagccagaactggacttttcatggtcctggagccagtggccaggcagctgccaattggctagcaggatttggaaggggtcccacaccacccaccttgctgggcatcaggcaaaatgcaaacaccacaggcagaagaaggctattggtcttagacgagttcaaaatggagaaaagaatcagcagaatgttctatataatgacttttctgtttctaaccttgtggggcccctacctggtggcctgttattggagagtttttgcaagagggcctgtagtaccagggggatttctaacagctgctgtctggatgagttttgcccaagcaggaatcaatccttttgtctgcattttctcaaacagggagctgaggcgctgtttcagcacaacccttctttactgcagaaaatccaggttaccaagggaaccttactgtgttatatgagggagcatctgtaaatctttagccttgtgaaaactaaccttctctgctgagcaattgtggcccatagccatattttgagaagaaattcaagaatggaatcagcagttttaaggatttgggcaacattctgcagtctttgcaatagttcacctataatcctattttaaatctcagagtgatcctgctgactgccagcaaaggtttgtaattaagaagggactgaaccactgccctaagtttctttatgtggtcaaaaactagataatgaaagtagcaggtgctaagtatcagtgctaaatgctctgtatgtcactacatatgaaaaaacatcaaaaaacaattagcattggacatcttaataaattaagttgacatgaggtaaatgtgttgataaaaactaattttagaagtttgaagactttaaaacatttcatactactattgttttgcaaagactaaaatatttggggacttaaagtactgtaatccactaaagacgtgccaatgaattattggaatatcacactttaaaaaccgccttgtaagttctggggagcattccaaagcagtatattggttccaattagagtttactttttttgtattaatacattgctatttctaaataccactttcctcatctactagtaagattgctagcattgaactgtattatgtggtttttgttgatttggtataaagtttttccaattcatttatattttacaaatgctagatattggtctgggaggcaacattaatggtaccagcctgtcacaactgagcagttctaataatgcagaataaatacatgttgccttaaagggttatctagtatccttcatcttatttagcactggagcaaatagccaagggaaatcaaatcagtaactggtcatggtcatgcatctaaaagtgcatggaagatcatttattactttttcctttttttctcacatggtttgaaacttaaagtgcacatcactgaaataatgagattttcttctacggtgtgctaccctttctaaactgttctaagaagcaggcagttgatgtatgtttatattttaagtcagctgtcaaggggagaccacagccttagtatgacatcctgcacaatttgtgaagcatttattctactgaaggcacagtcttgtttatactttctgcacattcagtgtattggtaatttaaattatttcagttttaacttgtgaaagcttatattatgatttctggtattttagaaatacattagagtctgtgagtctcattctttaagatacagatgtgtgaacttcaatataaagttgcatttgccaaaatttacccgtgtagcctgttaattttcttgaaataagttttacatttttggcacataacaacgttttttttaatttgggaggcaagcacaaactaggaagactagctttattatggttttgctttttgattcttgtagctactatattccagactggaaatgtatgaatgataatcaacataatgctgataaactgacataatattatctgtaaaagcattatttggtagtttattataatcatccctctattattcttaaatgccagtagtatttagagatgtgtacctgcttagttaattggctcagaattttaatataaacatcacactttaatttggagcatagtaccatagaaatttggggttctaaatatacaacttgtaagaagaatggtttacactaacattatgacaaaactagaaaaagttattatttttgtttgctttctgttgttttgtttattggttggtttttgtgaagtttattttttttttggtatttgataattaagattaggaatctaataacacagaattccatattgctatagtacttctgtaaagagaatatcaatataaataaggaaaataaatcaatgaaatgtttcaatggttaaaaaaaaaaaaaaaaaaa

SEQ ID NO: 6 - protein, 370 aa, Homo sapiens
MANYSHAADNILQNLSPLTAFLKLTSLGFIIGVSVVGNLLISILLVKDKTLHRAPYYFLLDLCCSDILRSAICFPFVFNSVKNGSTWTYGTLTCKVIAFLGVLSCFHTAFMLFCISVTRYLAIAHHRFYTKRLTFWTCLAVICMVWTLSVAMAFPPVLDVGTYSFIREEDQCTFQHRSFRANDSLGFMLLLALILLATQLVYLKLIFFVHDRRKMKPVQFVAAVSQNWTFHGPGASGQAAANWLAGFGRGPTPPTLLGIRQNANTTGRRRLLVLDEFKMEKRISRMFYIMTFLFLTLWGPYLVACYWRVFARGPVVPGGFLTAAVWMSFAQAGINPFVCIFSNRELRRCFSTTLLYCRKSRLPREPYCVI

SEQ ID NO: 7 - DNA, 875 bp, Homo sapiens
ggcacgaggaaacccaaccgcagttgactagcacctgctaccgcgcctttgcttcctggcgcacgcggagcctcctggagcctgccaccatcctgcctactacgtgctgccctgcgcccgcagccatgtgccgcaccctggccgccttccccaccacctgcctggagagagccaaagagttcaagacacgtctggggatctttcttcacaaatcagagctgggctgcgatactgggagtactggcaagttcgagtggggcagtaaacacagcaaagagaatagaaacttctcagaagatgtgctggggtggagagagtcgttcgacctgctgctgagcagtaaaaatggagtggctgccttccacgctttcctgaagacagagttcagtgaggagaacctggagttctggctggcctgtgaggagttcaagaagatccgatcagctaccaagctggcctccagggcacaccagatctttgaggagttcatttgcagtgaggcccctaaagaggtcaacattgaccatgagacccgcgagctgacgaggatgaacctgcagactgccacagccacatgctttgatgcggctcaggggaagacacgtaccctgatggagaaggactcctacccacgcttcctgaagtcgcctgcttaccgggacctggctgcccaagcctcagccgcctctgccactctgtccagctgcagcctggacgagccctcacacacctgagtctccacggcagtgaggaagccagccgggaagagaggttgagtcacccatccccgaggtggctgcccctgtgtgggaggcaggttctgcaaagcaagtgcaagaggacaaaaaaaaaaaaaaaaaaaaaaaaaaaaaaaa

SEQ ID NO: 8 - protein, 202 aa, Homo sapiens
MCRTLAAFPTTCLERAKEFKTRLGIFLHKSELGCDTGSTGKFEWGSKHSKENRNFSEDVLGWRESFDLLLSSKNGVAAFHAFLKTEFSEENLEFWLACEEFKKIRSATKLASRAHQIFEEFICSEAPKEVNIDHETRELTRMNLQTATATCFDAAQGKTRTLMEKDSYPRFLKSPAYRDLAAQASAASATLSSCSLDEPSHT

SEQ ID NO: 9 - DNA, 2082 bp, Homo sapiens
cggacgcgtgggcgagcggttccttgtgggctagaagaatcctgcaaaaatgtctctctatccatctctcgaagacttgaaggtagacaaagtaattcaggctcaaactgctttttctgcaaaccctgccaatccagcaattttgtcagaagcttctgctcctatccctcacgatggaaatctctatcccagactgtatccagagctctctcaatacatggggctgagtttaaatgaagaagaaatacgtgcaaatgtggccgtggtttctggtgcaccacttcaggggttggtagcaagaccttccagtataaactatatggtggctcctgtaactggtaatgatgttggaattcgtagagcagaaattaagcaagggattcgtgaagtcattttgtgtaaggatcaagatggaaaaattggactcaggcttaaatcaatagataatggtatatttgttcagctagtccaggctaattctccagcctcattggttggtctgagatttggggaccaagtacttcagatcaatggtgaaaactgtgcaggatggagctctgataaagcgcacaaggtgctcaaacaggcttttggagagaagattaccatgaccattcgtgacaggccctttgaacggacgattaccatgcataaggatagcactggacatgttggttttatctttaaaaatggaaaaataacatccatagtgaaagatagctctgcagccagaaatggtcttctcacggaacataacatctgtgaaatcaatggacagaatgtcattggattgaaggactctcaaattgcagacatactgtcaacatctgggactgtagttactattacaatcatgcctgcttttatctttgaacatattattaagcggatggcaccaagcattatgaaaagcctaatggaccacaccattcctgaggtttaaaattcacggcaccatggaaatgtagctgaacgtctccagtttccttctttggcaacttctgtattatgcacgtgaagccttcccggagccagcgagcatatgctgcatgaggacctttctatcttacattatggctgggaatcttactctttcatctgataccttgttcagatttcaaaatagttgtagccttatcctggttttacagatgtgaaactttcaagagatttactgactttcctagaatagtttctctactggaaacctgatgcttttataagccattgtgattaggatgactgttacaggcttagctttgtgtgaaaaccagtcacctttctcctaggtaatgagtagtgctgttcatattactttagttctatagcatacttgcatctttaacatgctatcatagtacatttagaatgattgcctttgattttttttttaaattctgtgtgtgtgtgtgtaaaatgccaattaagaacactggtttcattccatgtaagcattaaacagtgtatgtaggtttcaagagattgtgatgattcttaaattttaactaccttcacttaatatgcttgaactgtcgccttaactatgttaagcatctagactaaaagccaaaatataattattgctgcctttctaaaaacccaaaatgtagttctctattaacctgaaatgtacactagcccagaacagtttaatggtacttactgagctatagcatagctgcttagttgtttttgagattttttagtcaacacataatggaaacttctttcttctaaaagttgccagtgccacttttaagaagtgaatcactatatgtgatgtaaaagttattacactaaacaggataaacttttgactccccttttgttcatttgtggattaagtggtataatacttaattttggcatttgactcttaagattatgtaacctagctactttgggatggtcttagaatatttttctgataacttgttccttttcctgactcctccttgcaaacaaaatgatagttgacactttatcctgatttttttcttctttttggtttatgtctattctaattaaatatgtataaataaagttacattttagtctgtcaaaaaaaaaaaaaaaaaaaaa

SEQ ID NO: 10 - protein, 298 aa, Homo sapiens
MSLYPSLEDLKVDKVIQAQTAFSANPANPAILSEASAPIPHDGNLYPRLYPELSQYMGLSLNEEEIRANVAVVSGAPLQGQLVARPSSINYMVAPVTGNDVGIRRAEIKQGIREVILCKDQDGKIGLRLKSIDNGIFVQLVQANSPASLVGLRFGDQVLQINGENCAGWSSDKAHKVLKQAFGEKITMTIRDRPFERTITMHKDSTGHVGFIFKNGKITSIVKDSSAARNGLLTEHNICEINGQNVIGLKDSQIADILSTSGTVVTITIMPAFIFEHIIKRMAPSIMKSLMDHTIPEV

SEQ ID NO: 11 - DNA, 1783 bp, Homo sapiens
cctctcggagctggaaatgcagctattgagatcttcgaatgctgcggagctggaggcggaggcagctggggaggtccgagcgatgtgaccaggccgccatcgctcgtctcttcctctctcctgccgcctcctgtgtcgaaaataacttttttagtctaaagaaagaaagacaaaagtagtcgtccgcccctcacgccctctcttcctctcagccttccgcccggtgaggaagcccggggtggctgctccgccgtcggggccgcgccgccgagccccagcgccccgggccgcccccgcacgccgcccccatgcatcccttctacacccgggccgccaccatgataggcgagatcgccgccgccgtgtccttcatctccaagtttctccgcaccaaggggctgacgagcgagcgacagctgcagaccttcagccagagcctgcaggagctgctggcagaacattataaacatcactggttcccagaaaagccatgcaagggatcgggttaccgttgtattcgcatcaaccataaaatggatcctctgattggacaggcagcacagcggattggactgagcagtcaggagctgttcaggcttctcccaagtgaactcacactctgggttgacccctatgaagtgtcctacagaattggagaggatggctccatctgtgtgctgtatgaagcctcaccagcaggaggtagcactcaaaacagcaccaacgtgcaaatggtagacagccgaatcagctgtaaggaggaacttctcttgggcagaacgagcccttccaaaaactacaatatgatgactgtatcaggttaagatatagtctgtggatggatcatctgatgatgatccataaatttgatttttgctttgggtgggctcctcttggggatggattatggaatttaaaccatgtcacagctgtgaagatctggcacaagatagaatggtaaaaaaaaaaaaaaattttaagtgacagtgccatagtttggacagtacctttcaatgattaattttaatagcctgtgagtccaagtaaatgatcactttatttgctagggagggaagtcctagggtggtttcagtttctcccagacatacctaaatttttacatcaatccttttaaagaaaatctgtatttcaaagaatctttctctgcagtaaatctcgcaggggaatttgcactattacacttgaaagttgttattgttaaccttttcggcagcttttaataggaaagttaaacgttttaaacatggtagtactggaaattttacaagacttttacctagcacttaaatatgtataaatgtacataaagacaaactagtaagcatgacctggggaaatggtcagaccttgtattgtgtttttggccttgaaagtagcaagtgaccagaatctgccatggcaacaggctttaaaaaagacccttaaaaagacactgtctcaactgtggtgttagcaccagccagctctctgtacatttgctagcttgtagttttctaagactgagtaaacttcttatttttagaaagtggaggtctggtttgtaactttccttgtacttaattgggtaaaagtcttttccacaaaccaccatctattttgtgaactttgttagtcatcttttatttggtaaattatgaactggtgtaaatttgtacagttcatgtatattgattgtggcaaagttgtacagatttctatattttggatgagaaatttttcttctctctataataaatcgtttcttatcttggcatttttaacc

SEQ ID NO: 12 - protein, 171 aa, Homo sapiens
MHPFYTRAATMIGEIAAAVSFISKFLRTKGLTSERQLQTFSQSLQELLAEHYKHHWFPEKPCKGSGYRCIRINHKMDPLIGQAAQRIGLSSQELFRLLPSELTLWVDPYEVSYRIGEDGSICVLYEASPAGGSTQNSTNVQMVDSRISCKEELLLGRTSPSKNYNMMTVSG

SEQ ID NO: 13 - DNA, 1040 bp, Homo sapiens
gcgaggcgccaccgacgcggaagactataagccccagcgggcgacgaccgaacgcccccgggaacaccgggccccgagctcggtcccgcgcccgaggatcctccacggggctagatggctgcgtcgggggcgggagcggaggtgagcgggcgctagggccgcgagcccccgccggcccttcctccagcgccctgcggaccccgcagaaggcgctcgcctccctagcccgcaaaaacatatcgatttttctcgctgtggcaacggggacgtcctgatagatcctctgctccaataggcaactccggccttccctgccctgacctggaacctctgggagggctgcagagtaagtgccgcctctgcgctccgacggaggcacgaggcctgtggagtaggtccctctgttccgacaggtgcgacacttggcgctccatgcttgcgggtgccgggaggcctggcctcccccagggccgccacctctgctggttgctctgtgctttcaccttaaagctctgccaagcagaggctcccgtgcaggaagagaagctgtcagcaagcacctcaaatttgccatgctggctggtggaagagtttgtggtagcagaagagtgctctccatgctctaatttccgggctaaaactacccctgagtgtggtcccacaggatatgtagagaaaatcacatgcagctcatctaagagaaatgagttcaaaagctgccgctcagctttgatggaacaacgcttattttggaagttcgaaggggctgtcgtgtgtgtggccctgatcttcgcttgtcttgtcatcattcgtcagcgacaattggacagaaaggctctggaaaaggtccggaagcaaatcgagtccatatagctacattccacccttgtatcctgggtcttagagaccctatctcagacagtgaaagtgaaatggactgatttgcactcttggttctttggagccttgtggtggaatccccttttccccatcttcttctttcagatcattaatgagcagaataaaaagagtaaaatggt

SEQ ID NO: 14 - protein, 146 aa, Homo sapiens
MLAGAGRPGLPQGRHLCWLLCAFTLKLCQAEAPVQEEKLSASTSNLPCWLVEEFVVAEECSPCSNFRAKTTPECGPTGYVEKITCSSSKRNEFKSCRSALMEQRLFWKFEGAVVCVALIFACLVIIRQRQLDRKALEKVRKQIESI

SEQ ID NO: 15 - DNA, 826 bp, Homo sapiens
atggcaaagcaaccttctgatgtaagttctgagtgtgaccgagaaggtagacaattgcagcctgcggagaggcctccccagctcagacctggggcccctacctccctacagacagagccacaagacaggagcccagcacccatgagttgtgacaaatcaacacaaaccccaagtcctccttgccaggccttcaaccactatctcagtgcaatggcttccatgaggcaggctgaacctgcagatatgcgcccagagatatggatcgcccaagagttgcggcgtattggagacgagtttaacgcttactatgcaaggagggtatttttgaataattaccaagcagccgaagaccacccacgaatggttatcttacgactgttacgttacattgtccgcctggtgtggagaatgcattgacaggttctttgcggagccgagataccatgcagacattttgcttgttcaaaccaacaagacccagcaccgcggtctcctggtgccattattatgcagccagcggttctcttgtggagggggcaggtgacgtttcagaagacaccgagctggatgggactacctttctgttcatcaccacacagcagaatttctaatggaagtttgttgtgaatgtaaaggagggagcattctttgctttttaatatacaaaccatggttttttggagcaggattttgtgtaagaatggtgtttacatgcagtgtgttttccccctcaccttcaataaggtttttcaaaaaggaaatggaaactttttaaccaatttgtgaataacttttgtattaaaattttaagaacctaaaaaaaaaa

SEQ ID NO: 16 - protein, 138 aa, Homo sapiens
MAKQPSDVSSECDREGRQLQPAERPPQLRPGAPTSLQTEPQDRSPAPMSCDKSTQTPSPPCQAFNHYLSAMASMRQAEPADMRPEIWIAQELRRIGDEFNAYYARRVFLNNYQAAEDHPRMVILRLLRYIVRLVWRMH

SEQ ID NO: 17 - DNA, 3536 bp, Homo sapiens
ggcccctcgagcctcgaaccggaacctccaaatccgagacgctctgcttatgaggacctcgaaatatgccggccagtgaaaaaatcttatggctttgagggcttttggttggccaggggcagtaaaaatctcggagagctgacaccaagtcctcccctgccacgtagcagtggtaaagtccgaagctcaaattccgagaattgagctctgttgattcttagaactggggttcttagaagtggtgatgcaagaagtttctaggaaaggccggacaccaggttttgagcaaaattttggactgtgaagcaaggcattggtgaagacaaaatggcctcgccggctgacagctgtatccagttcacccgccatgccagtgatgttcttctcaaccttaatcgtctccggagtcgagacatcttgactgatgttgtcattgttgtgagccgtgagcagtttagagcccataaaacggtcctcatggcctgcagtggcctgttctatagcatctttacagaccagttgaaatgcaaccttagtgtgatcaatctagatcctgagatcaaccctgagggattctgcatcctcctggacttcatgtacacatctcggctcaatttgcgggagggcaacatcatggctgtgatggccacggctatgtacctgcagatggagcatgttgtggacacttgccggaagtttattaaggccagtgaagcagagatggtttctgccatcaagcctcctcgtgaagagttcctcaacagccggatgctgatgccccaagacatcatggcctatcggggtcgtgaggtggtggagaacaacctgccactgaggagcgcccctgggtgtgagagcagagcctttgcccccagcctgtacagtggcctgtccacaccgccagcctcttattccatgtacagccacctccctgtcagcagcctcctcttctccgatgaggagtttcgggatgtccggatgcctgtggccaaccccttccccaaggagcgggcactcccatgtgatagtgccaggccagtccctggtgagtacagccggccgactttggaggtgtcccccaatgtgtgccacagcaatatctattcacccaaggaaacaatcccagaagaggcacgaagtgatatgcactacagtgtggctgagggcctcaaacctgctgccccctcagcccgaaatgccccctacttcccttgtgacaaggccagcaaagaagaagagagaccctcctcggaagatgagattgccctgcatttcgagccccccaatgcacccctgaaccggaagggtctggttagtccacagagcccccagaaatctgactgccagcccaactcgcccacagaggcctgcagcagtaagaatgcctgcatcctccaggcttctggctcccctccagccaagagccccactgaccccaaagcctgcaactggaagaaatacaagttcatcgtgctcaacagcctcaaccagaatgccaaaccaggggggcctgagcaggctgagctgggccgcctttccccacgagcctacacggccccacctgcctgccagccacccatggagcctgagaaccttgacctccagtccccaaccaagctgagtgccagcggggaggactccaccatcccacaagccagccggctcaataacatcgttaacaggtccatgacgggctctccccgcagcagcagcgagagccactcaccactctacatgcaccccccgaagtgcacgtcctgcggctctcagtccccacagcatgcagagatgtgcctccacaccgctggccccacgttcgctgaggagatgggagagacccagtctgagtactcagattctagctgtgagaacggggccttcttctgcaatgagtgtgactgccgcttctctgaggaggcctcactcaagaggcacacgctgcagacccacagtgacaaaccctacaagtgtgaccgctgccaggcctccttccgctacaagggcaacctcgccagccacaagaccgtccataccggtgagaaaccctatcgttgcaacatctgtggggcccagttcaaccggccagccaacctgaaaacccacactcgaattcactctggagagaagccctacaaatgcgaaacctgcggagccagatttgtacaggtggcccacctccgtgcccatgtgcttatccacactggtgagaagccctatccctgtgaaatctgtggcacccgtttccggcaccttcagactctgaagagccacctgcgaatccacacaggagagaaaccttaccattgtgagaagtgtaacctgcatttccgtcacaaaagccagctgcgacttcacttgcgccagaagcatggcgccatcaccaacaccaaggtgcaataccgcgtgtcagccactgacctgcctccggagctccccaaagcctgctgaagcatggagtgttgatgctttcgtctccagccccttctcagaatctacccaaaggatactgtaacactttacaatgttcatcccatgatgtagtgcctctttcatccactagtgcaaatcatagctgggggttgggggtggtgggggtcggggcctgggggactgggagccgcagcagctccccctcccccactgccataaaacattaagaaaatcatattgcttcttctcctatgtgtaaggtgaaccatgtcagcaaaaagcaaaatcattttatatgtcaaagcaggggagtatgcaaaagttctgacttgactttagtctgcaaaatgaggaatgtatatgttttgtgggaacagatgtttcttttgtatgtaaatgtgcattcttttaaaagacaagacttcagtatgttgtcaaagagagggctttaatttttttaaccaaaggtgaaggaatatatggcagagttgtaaatatataaatatatatatatataaaataaatatatataaacctaacaaagatatattaaaaatataaaactgcgttaaaggctcgattttgtatctgcaggcagacacggatctgagaatctttattgagaaagagcacttaagagaatattttaagtattgcatctgtataagtaagaaaatattttgtctaaaatgcctcagtgtatttgtatttttttgcaagtgaaggtttacaatttacaaagtgtgtattaaaaaaaacccaaagaacccaaaaatctgcagaaggaaaaatgtgtaattttgttctagttttcagtttgtatatacccgtacaacgtgtcctcacggtgccttttttcacggaagttttcaatgatgggcgagcgtgcaccatccctttttgaagtgtaggcagacacagggacttgaagttgttactaactaaactctctttgggaatgtttgtctcatcccattctgcgtcatgcttgtgtgataactactccggagacagggtttggctgtgtctaaactgcattaccgcgttgtaaaaaatagctgtaccaatataagaataaaatgttggaaagtcgcaaaaaaaaaaaa

SEQ ID NO: 18 - protein, 706 aa, Homo sapiens [sequence omitted]

SEQ ID NO: 19 - DNA, 1625 bp, Homo sapiens
tttgcggcaagctcgggccgggcttgcttgacggcggtgtggcggaggccccgccccaggcggcaggaacctggagggaggcggaggaatatgtccgagagggaagtgtcgactgcgccggcgggaacagacatgcctgcggccaagaagcagaagctgagcagtgacgagaacagcaatccagacctctctggagacgagaatgatgacgctgtcagtatagaaagtggtacaaacactgaacgccctgatacacctacaaacacgccaaatgcacctggaaggaaaagttggggaaagggaaaatggagttcaaagaaatgcaaatattctttcaaatgtgtaaatagtctcaaggaagatcataaccaaccattgtttggagttcagtttaactggcacagtaaagaaggagatccattagtgtttgcaactgtaggaagcaacagagttaccttgtatgaatgtcattcacaaggagaaatccggttgttgcaatcttacgtggatgctgatgctgatgaaaacttttacacttgtgcatggacctatgatagcaatacgagccatcctctgctggctgtagctggatctagaggcataattaggataataaatcctataacaatgcagtgtataaagcactatgttggccatggaaatgctatcaatgagctgaaattccatccaagagatccaaatcttctcttgtcagtaagtaaagatcatgctttacgattatggaatatccagacggacactctggtggcaatatttggaggcgtagaagggcacagagatgaagttctaagtgctgattatgatcttttgggtgaaaaaataatgtcctgtggtatggatcattctcttaaactttggaggatcaattcaaagagaatgatgaatgcaattaaggaatcttatgattataatccaaataaaactaacaggccatttatttctcagaaaatccattttcctgatttttctaccagagacatacataggaattatgttgattgtgtgcgatggttaggcgatttgatactttctaagtcttgtgaaaatgccattgtgtgctggaaacctggcaagatgaaagatgatatagataaaattaaacccagtgaatctaatgtgactattcttgggcgatttgattacagccagtgtgacatttggtacatgaggttttctatggatttctggcaaaagatgcttgcattgggcaatcaagttggcaaactttatgtttgggatttagaagtagaagatcctcataaagccaaatgtacaacactgactcatcataaatgtggtgctgctattcgacaaaccagttttagcagggatagcagcattcttatagctgtttgtgatgatgccagtatttggcgctgggatcgacttcgataaaatactttgcctaatcaaaattagagtgtgtttgttgtctgtgtaaaatagaattaatgtatcttgctagtaagggcacgtagagcatttagagttgtctttcagcattcaatcaggctgagctgaatgtagtgatgtttacattgtttacattctttgtactgtcttcctgctcagactctactgcttttaataaaaatttatttttg

SEQ ID NO: 20 - protein, 535 aa, Homo sapiens
MSRGRRENRPPGPRDGKQPGSRAGGRARARPFFSSVAGSHARPPRRLGAICDSGGSGGGGGAGSFAAGSGRACLTAVWRRPRPRRQEPGGRRRNMSEREVSTAPAGTDMPAAKKQKLSSDENSNPDLSGDENDDAVSIESGTNTERPDTPTNTPNAPGRKSWGKGKWKSKKCKYSFKCVNSLKEDHNQPLFGVQFNWHSKEGDPLVFATVGSNRVTLYECHSQGEIRLLQSYVDADADENFYTCAWTYDSNTSHPLLAVAGSRGIIRIINPITMQCIKHYVGHGNAINELKFHPRDPNLLLSVSKDHALRLWNIQTDTLVAIFGGVEGHRDEVLSADYDLLGEKIMSCGMDHSLKLWRINSKRMMNAIKESYDYNPNKTNRPFISQKIHFPDFSTRDIHRNYVDCVRWLGDLILSKSCENAIVCWKPGKMEDDIDKIKPSESNVTILGRFDYSQCDIWYMRFSMDFWQKMLALGNQVGKLYVWDLEVEDPHKAKCTTLTHHKCGAAIRQTSFSRDSSILIAVCDDASIWRWDRLR

SEQ ID NO: 21 - DNA, 2905 bp, Homo sapiens
ttggggagcgccggggcagggaggcgggcaccaggcgcgggtccctccgggcaggcgaggtaggcctgggcctgacgccggccacgcagcggcgggagagtgagcactcgggcggcggcgtcctggagacccgcgagagatggaagcggcggcgacgccggcggctgccggggcggcgaggcgcgaggagctagatatggatgtaatgaggcccttgataaatgagcagaattttgatgggacatcagatgaagaacatgagcaagagcttctgcctgttcagaagcattaccaacttgatgatcaagagggcatttcatttgtacaaactcttatgcaccttcttaaaggaaatattggaactggccttttaggacttccattggcaataaaaaatgcaggcatagtgcttggaccaatcagccttgtgtttataggaattatttctgttcactgtatgcacatattggtacgttgcagtcactttctatgtctgaggtttaaaaagtcaacattaggttatagtgacactgtgagctttgctatggaagtgagtccttggagttgtcttcagaagcaagcagcatgggggcggagtgtggttgacttttttctggtgataacacagctgggattctgtagtgtttatattgtcttcttagctgaaaatgtgaaacaagttcatgaaggattcctggagagtaaagtgtttatttcaaatagtaccaattcatcaaacccttgtgagagaagaagtgttgacctaaggatatatatgctttgctttcttccatttataattcttttggtcttcattcgtgaactaaagaatctatttgtactttcattccttgccaacgtttccatggctgtcagtcttgtgataatttaccagtatgttgtcaggaacatgccagatccccacaaccttccaatagtggctggttggaagaaatacccactcttttttggtactgctgtatttgcttttgaaggcataggagtggtccttccactggaaaaccaaatgaaagaatcaaagcgtttccctcaagcgttgaatattggcatggggattgttacaactttgtatgtaacattagctactttaggatatatgtgtttccatgatgaaatcaaaggcagcataactttaaatcttccccaagatgtatggttatatcaatcagtgaaaattctatattcctttggcatttttgtgacatattcaattcagttctatgttccagcagagatcattatccctgggatcacatccaaatttcatactaaatggaagcaaatctgtgaatttgggataagatccttcttggttagtattacttgtgccggagcaattcttattcctcgtttagacattgtgatttccttcgttggagctgtgagcagcagcacattggccctaatcctgccacctttggttgaaattcttacattttcgaaggaacattataatatatggatggtcctgaaaaatatttctatagcattcactggagttgttggcttcttattaggtacatatataactgttgaagaaattatttatcctactcccaaagttgtagctggcactccacagagtccttttctaaatttgaattcaacatgcttaacatctggtttgaaatagtaaaagcagaatcatgagtcttctatttttgtcccatttctgaaaattatcaagataactagtaaaatacattgctatatacataaaaatggtaacaaactctgttttctttggcacgatattaatattttggaagtaatcataactctttaccagtagtggtaaacctatgaaaaatccttgcttttaagtgttagcaatagttcaaaaaattaagttctgaaaattgaaaaaattaaaatgtaaaaaaattaaagaataaaaatacttctattattcttttatctcagtaagaaataccttaaccaagatatctctcttttatgctactcttttgccactcacttgagaacagaataggatttcaacaataagagaataaaataagaacatgtataacaaaaagctctctccagatcatccctgtgaatgccaaagtaaactttatgtacagtgtaaaaaaaaaaaatctcagttatgtttttattagccaaattctaatgattggctcctggaagtatagaaaactcccattaacataatataagcatcagaaaattgcaaacactagaattaattttacactctaatggtagttgatcttcatagtcaagaggcactgttcaagatcatgacttagtgtttcaatgaaatttgaaaagggactttaaaacttatccagtgcaactcccttgtttttcgtcagaggaaaaggaggcctagaaaggttaagtaacttggtctgagaccactcagccttgagatcaagaaaacctaatcttctgactcccaggccaggatgttttatttctcacatcatgtccaagaaaaagaataaattatgttcagcttaattttagtgttgaatctatttgattatattttaatactttgaaaatgaatgtgtgatttttaatagtatatgtgacctgagcagaaaatcagggaactccaagaagcctacactgtggccatataaacctcagcaagagaaagaagctatgttcttttaaaacagaatagagaccgcttgctggtgaaactcctggctagtaagatgtgtgtctagctatactatttgtggcttgagcttttttaattattaccttcctttcctgagttttgtaggcaccacattcctgaatggcagaaaatagacacctcagaaaacggaggatttgtggactctttccagccctgtggcttttcttatcacagccttttatttattatgagcagaataaaagaatc

SEQ ID NO: 22 - protein, 476 aa, Homo sapiens
EQNFDGTSDEEHEQELLPVQKHYQLDDQEGISFVQTLMHLLKGNIGTGLLGLPLAIKNAGIVLGPISLVFIGIISVHCMHILVRCSHFLCLRFKKSTLGYSDTVSFAMEVSPWSCLQKQAAWGRSVVDFFLVITQLGFCSVYIVFLAENVKQVHEGFLESKVFISNSTNSSNPCERRSVDLRIYMLCFLPFIILLVFIRELKNLFVLSFLANVSMAVSLVIIYQYVVRNMPDPHNLPIVAGWKKYPLFFGTAVFAFEGIGVVLPLENQMKESKRFPQALNIGMGIVTTLYVTLATLGYMCFHDEIKGSITLNLPQDVWLYQSVKILYSFGIFVTYSIQFYVPAEIIIPGITSKFHTKWKQICEFGIRSFLVSITCAGAILIPRLDIVISFVGAVSSSTLALILPPLVEILTFSKEHYNIWMVLKNISIAFTGVVGFLLGTYITVEEIIYPTPKVVAGTPQSPFLNLNSTCLTSGLK

SEQ ID NO: 23 - DNA, 830 bp, Homo sapiens
aaaggactcccaagaactggagctggaaggaacaggagtgtgtttcagcaaacagccttcatccaaaatggaggagccaggcccccgcttcagtcaagacctgcctagaaaaaggaagtggagcgggagcaccgtccagcctccgtgcagccgtggcgtgcaggactcgggtggctctgaggtcgcctggggaccccagaagggacaggctggcctgacatggaaggtgaaacaagcagcagcccctgccttcaggagaactctgcagactgcagtgccggggagctgaggggtcctgggaaggagctatggagtcccatccagcaggttacagccacatcctctaaatgggcgcgatttgtcctgccacctagaaaaagttcacatgtggacagtgagcagccaaggtctcttcagagggaccccaggccagctggtccagcacaggctaagcaagggacccccagagcacaggcctcaagagaaggcctcagcaggcccactgccgctgtccagcttcctcgggccacacaccccgtcacatctgggtctgagaggccttgcgggaagacctcatgggacgcaaggactccctgggcagagggtgggcccctggtcctggaggcacagaatcctcgacccacacgactatgtgacctctttataactggggaagacttcgatgatgatgtgtgatctgggactggcaggttattaatcgagatacacttgttaggagggacagggttcccctaaggcacttttaaagatactctgtaagaaccattaacaataaacttactgtcaatcaaaaaaaaaaaaaaaaaaaa

SEQ ID NO: 24 - protein, 158 aa, Homo sapiens
MEGETSSSPCLQENSADCSAGELRGPGKELWSPIQQVTATSSKWARFVLPPRKSSHVDSEQPRSLQRDPRPAGPAQAKQGTPRAQASREGLSRPTAAVQLPRATHPVTSGSERPCGKTSWDARTPWAEGGPLVLEAQNPRPTRLCDLFITGEDFDDDV

SEQ ID NO: 25 - DNA, 2074 bp, Homo sapiens
cacatgtgtatggcggtgaggcgggcgggtacatggcgggctctgtgggactggcgttgtgcgggcagacgttggtggtgcggggcggcagccgattcctggccacctccatagcaagcagtgatgatgacagcctcttcatctatgactgcagtgctgcagaaaagaagtcacaagaaaataaaggggaggacgcgcccttggaccaggggagcggtgcgattctggcgtccaccttctccaagtctggcagctattttgctttaaccgatgacagtaagcgtctgattcttttccgtacaaaaccatggcaatgtctgagtgtcaggaccgtggcaaggaggtgtacagccctgactttcatagcctcggaggagaaggtcttggtggccgacaagtctggagacgtctactccttttcggtgctggagccacacgggtgtggccgtctaaagctgggacacctgtctatgctggtagatgtggctgtgagtcctgatgaccgcttcatcctcactgccgaccgggacgagaagatccgagtcagctgggccgcggcgccccatagcatcgagtccttctgcttggggcacacagagtttgtgagccgtatctccgtggtgccaactcagcccgggctgcttctgtcctcctctggggacggcaccctgaggctctgggagtacaggagcggccgccagctgcactgctgtcacctggccagtctgcaggagctggtggacccccaggccccccagaagtttgccgcgtccaggattgcattctggtgccaggagaactgcgtggcgctcctgtgcgacggcactcctgtggtctacatcttccagctggacgcccgcagacagcagttggtgtacaggcagcagctggcgttccagcaccaagtgtgggacgtggctttcgaggagacccaggggctgtgggtgctccaggactgccaggaagcccccctggtgctctacaggcctgtgggcgaccagtggcagtctgttcctgagagcaccgtgttaaagaaagtctctggtgttcttcgtgggaactgggccatgctggaaggctctgccggcgcagacgccagcttcagcagtctctacaaggccacgttcgacaacgtgacctcctacctgaagaagaaagaggagagactgcagcagcagctagagaagaagcagcggcgccggagtcccccgcctgggcccgacgggcatgccaagaagatgagaccgggggaggcgacgctaagttgctgatcgtggcggtcagtggtgtctctcacctcaaattaggaaaagctttttaacttgttcccctgcatcctggcatgtcccttcaagaaggaaaaggtgacatcagttgtgaccagctcagaggatggggctgtcccctgggctctagaaagaacattctgtgtcaccagcacaggctcttgctgggtgcctgtgccccctttctggttgaagggaagccagaccagtggagtggaagctcttgaagcactttcttttcatgtcggaggctgcgtgtgagccggtggtggcggcagctgtctgtgtttctcctgttctcataccgcccttcgtgtccgctgcatcttcctctaggagcatctgtgggctgacgtttctggcatggtggatgttttcatgttgttccgccgtctcagcatccaggtgacgtgctgtcccgcagtagctgctcgccacacaggctgttgaaactcagcacgaatgcttgagcctgccccagccccagccgtagcccttgtgctcaggagctgctcctggagagtggctcccttgtgggaagtgagaaacacgtttcggagtcgcagggagctctgtctggcatcggtggcacagatggtgaacttgtttcaggaagtgtgagcacgggcctggctggcacccggtttacagggaggtgattgaggacgtcgttatgatttgatttgaccttggcacacactgcagagccacagggatgttgctgaatttcaatcaccgatcagcaaggatgaaccttctcaacttcctaggaatgtttagcagcaacc

SEQ ID NO: 26 - protein, 412 aa, Homo sapiens
MAGSVGLALCGQTLVVRGGSRFLATSIASSDDDSLFIYDCSAAEKKSQENKGEDAPLDQGSGAILASTFSKSGSYFALTDDSKRLILFRTKPWQCLSVRTVARRCTALTFIASEEKVLVADKSGDVYSFSVLEPHGCGRLELGHLSMLLDVAVSPDDRFILTADRDEKIRVSWAAAPHSIESFCLGHTEFVSRISVVPTQPGLLLSSSGDGTLRLWEYRSGRQLHCCHLASLQELVDPQAPQKFAASRIAFWCQENCVALLCDGTPVVYIFQLDARRQQLVYRQQLAFQHQVWDVAFEETQGLWVLQDCQEAPLVLYRPVGDQWQSVPESTVLKKVSGVLRGNWAMLEGSAGADASFSSLYKATFDNVTSYLKKKEERLQQQLEKKQRRRSPPPGPDGHAKKMRPGEATLSC

SEQ ID NO: 27 - DNA, 1544 bp, Homo sapiens
gcgctcccggaacgcgcgcaccgcagacggcgcggatcgcagggagccggtccgccgccggaacgggagcctgggtgtgcgtgtggagtccggactcgtgggagacgatcgcgatgaacacggtgctgtcgcgggcgaactcactgttcgccttctcgctgagcgtgatggcggcgctcaccttcggctgcttcatcaccaccgccttcaaagacaggagcgtcccggtgcggctgcacgtctcgcggatcatgctaaaaaatgtagaagatttcactggacctagagaaagaagtgatctgggatttatcacatttgatataactgctgatctagagaatatatttgattggaatgttaagcagttgtttctttatttatcagcagaatattcaacaaaaaataatgctctgaaccaagttgtcctatgggacaagattgttttgagaggtgataatccgaagctgctgctgaaagatatgaaaacaaaatattttttctttgacgatggaaatggtctcaagggaaacaggaatgtcactttgaccctgtcttggaacgtcgtaccaaatgctggaattctacctcttgtgacaggatcaggacacgtatctgtcccatttccagatacatatgaaataacgaagagttattaaattattctgaatttgaaacaacatatttttatacttaatgaattgtatctcattaatctcttcccttacatcttcatgtattgttggtttgttttttggttttgggttttttttttttttttttggtataagaactaacatcaaaaggcctgtttaaagggaaaggttaatgggctacttaatattatgaacaaaacaaaaaaacaaggctgccacagtggaatattatcttacaagaataagaactacataaaacagatttgtaaaaaatacatatttgaagtattccctgtatttccattattctttatggaatataaagtaagcatgaaaggtagttaaaactttcaggtgcctgtagagtcataataactgtattttatgccttgcattcacgcaaattcacattggatgtgatttaaaagtagacattctctttttcctcttttaggatatgtttgattactggaaaattaatatggttatttgttagaagtctggtttataaaaaagccaaaagtgatggaatttattccatttgtcttaggaaggcccataatacttgtttttcttacatgtgactagcaactttctccacttaaagactaaatacctctttatatgatgtaaattattctaattcattttaaaatcttttaggtcagcaaaatgtgtgtcttcagtgctttctctaaaaacgttcctttatagctttgtacttttttttttagcgttgccattgaaagttaaaatgtttgcatggtttaccctctgagttatgtttcttctagtgagcatgcctgctgtcactaagtgaattatttactactttttgtaggtctatattttaataattattgggataataataaaaaaaaaaaaaaaaaa

SEQ ID NO: 28 - protein, 180 aa, Homo sapiens
MNTVLSRANSLFAFSLSVMAALTFGCFITTAFKDRSVPVRLHVSRIMLKNVEDFTGPRERSDLGFITFDITADLENIFDWNVKQLFLYLSAEYSTKNNALNQVVLWDKIVLRGDNPKLLLKDMKTKYFFFDDGNGLKGNRNVTLTLSWNVVPNAGILPLVTGSGHVSVPFPDTYEITKSY

SEQ ID NO: 29 - DNA, 2912 bp, Homo sapiens
aatcgcgcccgctccgacgtgtccaggtccgcggccccgggagcttggcgcggcccggcctggatgcgctgggcggagggtgcaggggagggcacggcgccgcttgcttggcctgcgcacccggacctagaagccgggacgagccggggcagagccaggcgcgcggaagtctgaaggtgccctccagacacggccccgatgactgaactacagcaagatgtggaagacacaaagcctgcgaaagtgctcgggaagagggagagcaaacttggctcagcccactcagaggctgagaatggtgtggaggagaaaaagaaagcctgcaggtcgccaacagcccaatcccctaccccatctgtggaggcggactccccagaccagaagaaaatcattagcctatggtcaaaatccagttttgatggtgcctctttagcaagtgataagaacgactgtaaaacagaaagcaaaaatgaccctaagactgaaagaaaaaagtcttcatcttccagccagtacaaggccaatatgcactttcacaagttgtttcttagtgtcccaacggaggaaccactgaagcaaagctttacctgtgctctacagaaagaaatactataccaaggaaagctctttgtatcagaaaactggatttgttttcattccaaagtctttggaaaagacacaaagatctctattccagctttctcggtaaccctaataaagaaaaccaaaactgctcttctagtgccaaacgccctgatcatagcaacagtcacagacaggtacatatttgtctccttactctccagagattcaacttacaaactactaaaatctgtgtgtggacacttagaaaatacaagtgttggtaacagtcccaatccatcttctgctgaaaacagtttccgagcagaccgcccttcatctctgcctctggatttcaatgatgaattctcagatctggatggagtggttcaacgaagaaggcaagacatggaaggatatagtagttctggttctcaaactcctgaatctgagaactctcgagatttccatgcgacagaatcccaaacagttctgaatgtctccaagggagaagcaaagccaactcgggcagatgcccatgtgaacagagtacctgaaggaaaagccaagagtctccctgtacagggtctgtcagaaactgttggaatcttacataaagtcaagtctcagaaatgtccgatgcttcaccatattcttatattctatgcaattgttgtctgtgcactaatcatctcgaccttctacatgagatacagaattaatactctggaggagcagctggggttactaacctccattgtggacacccataatactgaacaggcagcaccatctggcctgaggtcacaagtacaattcaatgtggaggttctctgtcaagagcttacagctaacatagtgaaattagaaaagatacaaaataacttacagaagttgcttgagaatggtgactgatcgaccagattgcttgggccatcggaatacctcatgtttccctttgaagaaggtgcttcccgaggcgttttgtttgagtgcaccctgctggtcagaggtgcaagcagatgagaatccagacattgcatgtggaggtctccagctcaggaaagtggggagggaaataattttggttcttgtgcaataaaagttgaccttgactctctgaggaagattttgctgcttttgcctgaagaaaacagacccatctctggaggtctcaggaagggcccagcgaacacactctcttggataattaccacgatggcgtcagcaaacactccaccctgtgcctttttagtccttcccgccctcctgcctctcccttacacccctcttaacgactttcaaactaaaggatacatcatatactgacaaactcaatgtggtcctttcaagaattagccatgagtctcaaaaaggcaataaatggctctaagtggacaggtttgcttcaaacaagtaacatctacattttgtcttttttttttcagttctcctgttatgttctggttgaaatcacctgtgtgtcttaatttctcaattcctttttggcaagaatatcaagcaaggtgaatttaacattatgtttatgttttgttttgttgctgtaactaatagttaattggactgattcttacccagccctggtcaagaatctgtgaggcatgtgactgaagtactaaattaaacttattttgaaaccaaacctaatttttaagccaaaaggtgtaatagtgatttaatacaggatgaaaaacactgaatttttaagactgtaggtggactatgttagtagttttcaagcaggatgtctgtattcagcattcaataatgctaaaatccctttcagcatgaaatttgtatgtttttatcctttgctgactaaaataaaataactggtggtttgctaactatttaccatatgggttggctggtttttattaataattgtttagggtatcataagatctgtaagtacaaaggatattctgtttctatctgcaatgcatttgataatcatttctatgaaatgtattttatttaatcagataagctaataagcgaattggttacatcgtttgtatctgttggcctagtggacagctgtgcctggtgcacctctggcttttaataaatactcattggttgaaacaccctgctaacactgtgttttgtcagttcgtaaattcctttaaccaagacttaactatgctttttaactctttttccacctgccatctactactaccaactcacttatacttccttcctcccaagtaatcatttcaaaactaaaaaaggatttaagttcttgggttacaacggtttaaaggaaagaaaatgaactttgaagtcaaaaaaaaaaaaaaaaa

SEQ ID NO: 30 - protein, 432 aa, Homo sapiens
MTELQQDVEDTKPAKVLGKRESKLGSAHSEAENGVEEKKKACRSPTAQSPTPSVEADSPDQKKIISLWSKSSFDGASLASDKNDCKTESKNDPKTERKKSSSSSQYKANMHFHKLFLSVPTEEPLKQSFTCALQKEILYQGKLFVSENWICFHSKVFGKDTKISIPAFSVTLIKKTKTALLVPNALIIATVTDRYIFVSLLSRDSTYKLLKSVCGHLENTSVGNSPNPSSAENSFRADRPSSLPLDFNDEFSDLDGVVQRRRQDMEGYSSSGSQTPESENSRDFHATESQTVLNVSKGEAKPTRADAHVNRVPEGKAKSLPVQGLSETVGILHKVKSQKCPMLHHILIFYAIVVCALIISTFYMRYRINTLEEQLGLLTSIVDTHNTEQAAPSGLRSQVQFNVEVLCQELTANIVKLEKIQNNLQKLLENGD

SEQ ID NO: 31 - DNA, 2660 bp, Homo sapiens
gagaggacgtgctctgccagccagtgggaaggcaggccgcgcgcgcgggagcgcgggaggatcggcggctcgcggtcactggtccctggctcggttccccgcaccccggggctcacacttacccgcgcggaggagcagcggccgggtgtccacccccatcctgcgcccagtctcctcgattcccctcgctctgagccgggagagccgaacagctgaagagagttcactgactccccagccccaggtgggccttgtgcacatcatgaccagttttgaagatgctgacacagaagagacagtaacttgtctccagatgacggtttaccatcctggccagttgcagtgtggaatatttcagtcaataagttttaacagagagaaactcccttccagcgaagtggtgaaatttggccgaaattccaacatctgtcattatacttttcaggacaaacaggtttcccgagttcagttttctctgcagctgtttaaaaaattcaacagctcagttctctcctttgaaataaaaaatatgagtaaaaagaccaatctgatcgtggacagcagagagctgggctacctaaataaaatggacctgccatacaggtgcatggtcagattcggagagtatcagtttctgatggagaaggaagatggcgagtcattggaattttttgagactcaatttattttatctccaagatcactcttgcaagaaaacaactggccaccacacaggcccataccggagtatggcacttattcgctctgctcctcccaaagcagttctccgacagaaatggatgaaaatgagtcatgaacacagaaagtctaagaggagaaatatgatggatgaagagctctgtagatgctgtatagacactaaataagagttgattagggtagtatattatagtcatctgttatgctgtgaaatttggaattcagtattatcattttgaagtctgtaaattgtgttagtcattaacttagtcacctgttgtattctggatctacacaaaattattttaactgctcttattaatctgtgaggattaatatacaaaaagtatcctttgagatgaagtcgtgttctcaaaataaggttatattattttctttttctgcttgattttcatcttgtgttttgctttgtttttgtaaggaaccatctcttggtttggtcacatcagttcacaacagccatttgttttcaaggtcaaggctccaggcaggttgttactggtgtttgcagcctgtcagtacttgcagtactggaataggttctaggctagtgtctgcgcgtcactgtggttttagcatgggaggacttatttgagaaatactaccttacttttctatgatttctttttacagagttatagtgtgtttactcctaagatgacagttctctttgtctatattcagcatctaagacaaatatttaaacattttaaagaaccactgtgttaagtttaggattatttacttaccaaattagaagtttgacttttatgtgttatacacaatcttaaaatttcacgaattcacctttttaatagtatccatgtacataataaaatcaaagtttaattagccattttctttgaatttttttctaaataagggaaataactgttcttgggccactttacagagataaatgtatgtgaatgtttatgataaacgcttaaatatttctaaaatattaacttcaaaaaagtctttttcagttcttaaataaaaatttatttatttaagatacttattcgacttatcttaactaaggtagctatgaatgttaagtagatgaggtaaccattcagttaagttaaattgtagcattgccaggtagtgaggctcactgtacaattttccaggtaaatgaaatttcctgtagtaagaggtccgtatttttgtaacagccttttaaaaatgcttttgggaaccctccagcctcttaccaaaagaggctttaaacctcatcttgattcagactgtcagtctattcctgggcagtagtatgtgatgtccagcaccctaaccccgactccccagccctgggactattccagtagagtgaaatatttgtccctgtacaaagtggcctgaatgactgttggagttcctgtgtctggttttcctgtttattccctgtgatgcccagagtaatggcccatccaaagatgtccagatgtccatgtgctagtctccagaacttgtaactgtgttgttatgtggcaaaggggaatgaaggctgcagatggaagtaaaatagattatgctggattatctgggtgtgcccaattgatcaccggatccgtaaaagtggaagagaggcagatcaggatgtcagcgtgatgaggtgtgagacagacttgacttgctgttgctgggaggaaggggaggtcatgagccaaggaatgtggacagtctcttgaagctggaaagtgtgcattggacatctggaagccagaaaagacaaagaaatatccagaaaggaacaaagtcttgtggacaccttgattttggtccagtgagaatatgtttgacttgttaacctacaaaactttatgatgataaatttgtgttggtcgtaagccactaaatcacagtaatttgttatagcagcagatagaaaactaatatactccctttaatat

SEQ ID NO: 32 - protein, 274 aa, Homo sapiens
  misc_feature (22)..(22): Xaa can be any naturally occurring amino acid
  MISC_FEATURE (48)..(49): wherein "X" equals any naturally occuring amino acid.
RGARGRALPASGKAGRARGSAXGSAARGHWSLARFPAPRGSHLPARRXXGRVSTPILRPVSSIPLALSRESRTAEESSLTPQPQVGLVHIMTSFEDADTEETVTCLQMTVYHPGQLQCGIFQSISFNREKLPSSEVVKFGRNSNICHYTFQDKQVSRVQFSLQLFKKFNSSVLSFEIKNMSKKTNLIVDSRELGYLNKMDLPYRCMVRFGEYQFLMEKEDGESLEFFETQFILSPRSLLQENNWPPHRPIPEYGTYSLCSSQSSSPTEMDENES

SEQ ID NO: 33 - DNA, 1079 bp, Homo sapiens
gggcgggaccggacttccggctggtctgtggggtttcgggttcggggtttcctggtgggcgtcaggggcaggcaacagagtggcggccgctacggccctgtaacagggccatggagaagctgcggcgagtcctgagcggccaggacgacgaggagcagggcctgactgcgcaggtcctggatgcctcatcccttagtttcaacaccagattgaaatggtttgccatctgcttcgtatgtggcgttttcttttctattcttggaactggattgctgtggcttccgggcggcataaagctttttgcagtgttttataccctcggcaatcttgctgcgttagccagtacatgctttttaatgggacctgtgaagcaactgaagaaaatgtttgaagcaacaagattgcttgcaacaattgttatgcttttgtgtttcatatttaccctgtgtgctgctctttggtggcataagaagggactggctgtgttattctgcatattgcagttcttgtcaatgacctggtatagcctgtcgtacatcccatatgcaagggatgcagttattaaatgctgttcttctctcctaagttgaaaatcagaaacttgtggaaaagagcacttgaatgttggtactctatgtttggtgaagtttgcttttccccataaaacactccaggaacaactgacgtgacagttgaagaccgttttgtactaagtctcattttgtatactggtaaaaactacatgcttgattaaaccattaaatgcttgtaactttaaattcattatgtgtcattaatatacttttccaaagataagatttttaatcactgccagttgtaaattatttttagccaatttttaaatcttttcaaagcagctttgaaatgtgaatatttaaaggtagacctgtgctgcaagataattaaacttttttgcttttaaaaaatgtctgcatttttaagattttttttactttaaatgtgaaacttattttaagctaaaaattgcttattatatgtaataaaaataatatataaatctttacaattttgaaataaacccatccttggaaaaataa

SEQ ID NO: 34 - protein, 178 aa, Homo sapiens
GGRQGQATEWRPLRPWNGAMEKLRRVLSGQDDEEQGLTAQVLDASSLSFNTRLKWFAICFVCGVFFSILGTGLLWLPGGIKLFAVFYTLGNLAALASTCFLMGPVKQLKKMCEATRLLATIVMLLCFIFTLCAALWWHKKGLAVLFCILQFLSMTWYSLSYIPYARDAVIKCCSSLLS

SEQ ID NO: 35 - DNA, 5538 bp, Homo sapiens
cagcacgttcagctcttgacccaaatccaccttcttgccacctgcaaccccaacctcaatccggaggccactaccaccaggatatttcttaaagagctgggaacctttgctcaaagctccatcgcccttcaccatcagtacaaccccaagtttcagaccctgttccaaccctgtaacttgatgggagctatgcagctgattgaagacttcagcacacatgtcagcattgactgcagccctcataaaactgtcaagaagactgcgaatgaatttccctgtttgccaaagcaagtggcttggattctggccacaagcaaggttttcatgtatccagagttacttccagtgtgttccctgaaggcaaagaatccccaggataagatcgtcttcaccaaggctgaggacaatttgttagctttaggactgaagcattttgaaggaactgagtttcctaatcctctaatcagcaagtaccttctaacctgcaaaactgcccaccaactgacagtgagaatcaagaacctcaacatgaacagagctcctgacaacatcattaagttttataagaagaccaaacagctgccagtcctaggaaaatgctgtgaagagatccagccacatcagtggaagccacctatagagagagaagaacaccggctcccattctggttaaaggccagtctgccatccatccaggaagaactgcggcacatggctgatggtgctagagaggtaggaaatatgactggaaccactgagatcaactcagatcgaagcctagaaaaagacaatttggagttggggagtgaatctcggtacccactgctattgcctaagggtgtagtcctgaaactgaagccagttgccacccgtttccccaggaaggcttggagacagaagcgttcatcagtcctgaagcccctccttatccaacccagcccctctctccagcccagcttcaaccctgggaaaacaccagcccgatcaactcattcagaagcccctccgagcaaaatggtgctccggattcctcacccaatacagccagccactgttttacagacagttccaggtgtccctccactgggggtcagtggaggtgagagttttgagtctcctgcagcactgcctgctgtgccccctgaggccaggacaagcttccctctgtctgagtcccagactttgctctcttctgcccctgtgcccaaggtaatgctgccctcccttgccccttctaagtttcgaaagccatatgtgagacggagaccctcaaagagaagaggagtcaaggcctctccctgtatgaaacctgcccctgttatccaccaccctgcatctgttatcttcactgttcctgctaccactgtgaagattgtgagccttggcggtggctgtaacatgatccagcctgtcaatgcggctgtggcccagagtccccagactattcccatcactaccctcttggttaaccctacttccttcccctgtccattgaaccagtcccttgtggcctcctctgtctcacccttaattgtttctggcaattctgtgaatcttcctataccatccacccctgaagataaggcccacgtgaatgtggacattgcttgtgctgtggctgatggggaaaatgcctttcagggcctagaacccaaattagagccccaggaactatctcctctctctgctactgttttcccgaaagtggaacatagcccagggcctccactagcagatgcagagtgccaagaaggattgtcagagaatagtgcctgtcgctggaccgttgtgaaaacagaggaggggaggcaagctctggagccgctccctcagggcatccaggagtctctaaacaaccctacccctggggatttagaggaaattgtcaagatggaacctgaagaagctagagaggaaatcagtggatcccctgagcgtgatatttgtgatgacatcaaagtggaacatgctgtggaattggacactggtgccccaagcgaggagttgagcagtgctggagaagtaacgaaacagacagtcttacagaaggaagaggagaggagtcagccaactaaaaccccttcatcttctcaagagccccctgatgaaggaacctcagggacagatgtgaacaaaggatcatcaaagaatgctttgtcctcaatggatcctgaagtgaggcttagtagccccccagggaagccagaagattcatccagtgttgatggtcagtcagtggggactccagttgggccagaaactggaggagagaagaatgggccagaagaagaggaagaagaggactttgatgacctcacccaagatgaggaagatgaaatgtcatcagcttctgaggaatctgtgctttctgtcccagaactccaggtgagagctggagaatattctcaagtatttcgtggactcagtaatatgtatcacttattgatatgccacctgcttgcttgctgcactatggatagtcctaaaatcatttgtatttgaggaagaagaagcagaaggaatggaaagcctgcagaaagaggatgaaatgacggatgaagcagttggagactctgctgagaagcctcctacttttgcttcacctgagactgctccagaagtggagaccagcagaactccaccaggagagagcatcaaagctgctggaaaaggccggaacaatcatcgagctcgcaacaagcggggaagtcgggctcgggccagcaaggacacctccaagctgctgttgctgtatgatgaggacattctcgagcgagatccactcagggagcagaaggacttggcctttgcccaagcttatctgaccagggtgcgagaagccctacaacatatccctggcaagtatgaagacttccttcaagtcatctatgaatttgagtcaagtacccagagacggacggctgtagatctctacaaaagcctgcaaattctgctccaagactggcctcagctgttgaaagactttgctgctttcctgttacctgagcaagctctggcctgtggattatttgaggagcagcaggcttttgagaagagccgcaagttccttcggcagctggagatttgctttgcagagaacccctcacaccaccagaagattatcaaggtcctccaaggctgtgcagactgccttccccaggagatcaccgagctcaagacacagatgtggcagctcctcaagggccacgaccacctgcaggatgagttttctatcttctttgaccacttgcgcccagcagctagccggatgggtgactttgaagagatcaattggactgaggaaaaggagtatgagtttgatggctttgaagaagtggccctgcctgatgtggaagaagaggaggagcctcccaagatacccacagcctcaaagaacaagaggaaaaaagagatcggggtccaaaatcatgataagggagactgaatggccagatggggccaaggactgtgcctgctcctgccatgaaggaggtccagattccaagctgaagaagagcaaaaggcggagctgtagccactgtagcagcaaggtctgtgacagcaaatcctacaagagcaaggagccccatgagttggtgggcagcagcccccaccgagaggctagtcctatgcctggtgctaaggaagctgggcagggcaaggatatgatggaagaggaagccccagaggagcgggagagcactgaggccacccagagcaggactgtcaggaccaccagaaagggagagatgcctgtttcaggattggcagtggggagcactttgccatcccctcgagaagtgactgttacagaacggctcctcctggatggcccaccacctcattcaccagagactcctcaatttccccccacaactggagctgtactgtacactgttaagagaaaccaggttgggcctgaggttcgctcctgccccaaggcatcccccagacttcagaaagagagggagggccaaaaggcagtgagtgagtcagaggctttgatgctggtctgggatgcatcagaaactgagaaattgcctggtaccgtggaaccccctgcttccttcctgagtcctgtttcctcaaagaccagagatgcagggagaagacatgtgtccgggaaaccagacactcaagagagatggctgccctcaagcagagctcgggtgaagacaagagacaggacgtgccctgtccatgaatctccatcaggaattgacacctcagagacttctcccaaagcccctagagggggtttggctaaagacagtggaacacaggccaagggtccagagggggagcagcagccaaaggccgcagaagctacggtgtgtgccaacaacagcaaggtcagctccactggggaaaaggttgtcctgtggacaagggaagctgaccgtgtgatcctcaccatgtgccaggagcaaggggcacagccacagaccttcaacatcatctcccagcagctgggaaataagacccctgctgaggtttcccaccgttttcgagaactcatgcagctcttccacactgcctgtgaagccagctctgaggatgaggatgatgcaaccagtaccagcaatgcagaccagctgtctgaccatggggaccttctgtctgaagaggagctggatgaatgagactctgggaatcatctacacaggaccaaacccaacaggcgccctggcaccggggagggggtagttgtactctgcttgtacagtccttgagcccagtttacagatctggagagcaggaggccaggacaaggacaaaggctggaggatggagtaggacccaggggctctgccatcctaggcatcattcaaggtcttttatgaagactttacagatgtcctctgtaaatagcatcgagagtggagttcagctcctttctctacttttttttggtctgatggcacatatttattgttctgtggtctaatcacagtgtttctaaatgtaaaaagtgcatatgttggtgtagctagtcccgcgacattgagctcctctgcatgaagacactgggctcctgcatccagctgtttttattgcaaactagctcctttctcccacactgggaactttagtccacgaggctgtcaccaccctggtagcactgggccaggctttgtagctcctgcagcagctctgctacgtcatcgtgctccactccagcatccatgaagctggcccagcgccgcaagtcgagtttggtgaggtctctggccaaggcttccagggtctggtgcagggacgaagaggaacacagtgccccaaacactgggatgctctccactgctgtggagggagaggaaacagagacctgtagatggatgattattctgccctgggactcgccaaactgataaggaagtccaaccttagtagacttgattgtaaactcaacaaatttggtgtattgtccccttagtacaccagtactccagaggaagaatgcttttcttgggagccatagggtgaataaaggaatgtttaactgtggaaaaaaaaaaaaaaaaaaaaaaaaaaaaa

SEQ ID NO: 36 - protein, 835 aa, Homo sapiens
MQQHVQLLTQIHLLATCNPNLNPEATTTRIFLKELGTFAQSSIALHHQYNPKFQTLFQPCNLMGAMQLIEDFSTHVSIDCSPHKTVKKTANEFPCLPKQVAWILATSKVFMYPELLPVCSLKAKNPQDKIVFTKAEDNLLALGLKHFEGTEFPNPLISKYLLTCKTAHQLTVRIKNLNMNRAPDNIIKFYKKTKQLPVLGKCCEEIQPHQWKPPIEREEHRLPFWLKASLPSIQEELRHMADGAREVGNMTGTTEINSDRSLEKDNLELGSESRYPLLLPKGVVLKLKPVATRFPRKAWRQKRSSVLKPLLIQPSPSLQPSFNPGKTPARSTHSEAPPSKMVLRIPHPIQPATVLQTVPGVPPLGVSGGESFESPAALPAVPPEARTSFPLSESQTLLSSAPVPKVMLPSLAPSKFRKPYVRRRPSKRRGVKASPCMKPAPVIHHPASVIFTVPATTVKIVSLGGGCNMIQPVNAAVAQSPQTIPITTLLVNPTSFPCPLNQSLVASSVSPLIVSGNSVNLPIPSTPEDKAHVNVDIACAVADGENAFQGLEPKLEPQELSPLSATVFPKVEHSPGPPLADAECQEGLSENSACRWTVVKTEEGRQALEPLPQGIQESLNNPTPGDLEEIVKMEPEEAREEISGSPERDICDDIKVEHAVELDTGAPSEELSSAGEVTKQTVLQKEEERSQPTKTPSSSQEPPDEGTSGTDVNKGSSKNALSSMDPEVRLSSPPGKPEDSSSVDGQSVGTPVGPETGGEKNGPEEEEEEDFDDLTQDEEDEMSSASEESVLSVPELQVRAGEYSQVFRGLSNMYHLLICHLLACCTMDSPKIICI

SEQ ID NO: 37 - DNA, 4467 bp, Homo sapiens
agcctggacaggctttccagatggctgcggcggtcggtcggtgaggctttcccggctgtggtttggctgcgggcggcttgggcagcccgcgggcgcctcaggtagaagaagaaaggtgccactccggcatgaagacagactcgcttagtcgccagtcacttaagctgagtgcattgtgatttccaataattgaggcagtggttctaaaagctgtctacattaatgaaaagagcaatgtggccagcttgactaagccgccagcgcacagcgcggcaggacgcgcccgggtctcagcggacttgtgcatgttagctgtgtagatttatgtgagggcttgtaaaactctggtcttgtaaactagtcttaagcgcttttaatatggagacagatgagagcccctctccgctcccgtgtgggcccgcaggagaagcggtgatggagagccgagctcgccccttccaagcgctgccccgtgagcagtctccaccacctcccctgcaaacgtccagtggtgcagaggtaatggacgttggctctggtggtgatggacagtccgaactccctgctgaggaccccttcaacttctacggagcttctcttctctccaaaggatccttctctaagggccgcctcctcatagacccgaactgtagtggccacagcccgcgcaccgcccggcacgcacctgcggtccggaagttctcccctgaccttaagttgcttaaggatgtaaagattagcgtgagctttaccgagagctgcaggagtaaggacaggaaggtgctgtacacaggagcagagcgcgacgtgcgggcggagtgcggtctgctccttagccctgtcagtggggacgtgcatgcttgtccctttggcgggagtgttggtgacggggtaggcatagggggtgagagtgctgataagaaggatgaggagaatgagctggatcaggaaaagagagtggagtatgcagtgctcgatgagttagaagattttactgacaatttggagctagatgaagaaggagcaggcgggttcacggctaaagcaatcgttcagagagacagagtggatgaagaggccttgaatttcccctacgaggatgactttgacaacgatgtggatgctctgctggaagaaggcctttgtgcccccaaaaagaggcgaacagaggaaaaatatggcggagacagcgaccatccgtccgatggagagacaagtgtgcagccgatgatgaccaagattaaaacagtgctcaaaagtcgtggccgcccacctacagagccgctgcccgacgggtggatcatgacattccataactctggagtcccggtgtacctacacagagagtctcgggtggtcacctggtccaggccatacttcttgggaacgggaagcatacggaaacacgaccctcctctgagtagcatcccttgtctgcattataagaaaatgaaggacaacgaggaacgggagcaaagcagtgacctcacccctagtggggatgtgtcccccgtcaagcccctgagccgatctgcagagctggagtttcccctggatgagcctgactctatgggtgctgacccggggcccccggacgagaaagacccactaggggctgaggcagcccctggggccctggggcaggtgaaggccaaagtcgaggtgtgcaaagatgaatccgttgatctcgaggaatttcgaagctacctggagaagcgttttgactttgagcaagttactgtgaaaaaattcaggacttgggctgagcggcggcaattcaatcgggaaatgaagcggaagcaggcggagtccgagaggcccatcttgccagccaatcagaagctcattactttatcagtgcaagatgcacccacaaagaaagagtttgttattaaccccaacgggaaatccgaggtctgcatcctgcacgagtacatgcagcgtgtcctcaaggtccgccctgtctataatttctttgaatgtgagaacccaagtgagccttttggtgcctcggtgaccattgatggtgtgacttacggatctggaactgcaagcagcaaaaaacttgcgaagaataaagctgcccgagctacactggaaatcctcatccctgactttgttaaacagacctctgaagagaagcccaaagacagtgaagaactcgagtattttaaccacatcagcatcgaggactcgcgggtctacgagctgaccagcaaggctgggctgttgtctccatatcagatcctccacgagtgccttaaaagaaaccatgggatgggtgacacgtctatcaagtttgaagtggttcctgggaaaaaccagaagagtgaatacgtcatggcgtgtggcaagcacacagtgcgcgggtggtgtaagaacaagagagttggaaagcagttagcctcacagaagatccttcagctgctgcacccacatgtcaagaactgggggtctttactgcgcatgtatggccgtgagagcagcaagatggtcaagcaggagacatcggacaagagtgtgattgagctgcagcagtatgccaagaagaacaagcccaacctgcacatcctcagcaagctccaagaggagatgaagaggctagctgaggaaagggaggagactcgaaagaagcccaagatgtccattgtggcgtccgcccagcctggcggtgagcccctgtgcaccgtggacgtgtgagggaggtggcacgggccagggcgcgggggccgccagccgcacttctgaggagaccagcagtcatgcatcgtgcaccacagtgtcaggcctccaacccacgctccttccctgtggccaacctgtgggcccggccttagggtggaggctttagtgtacagggacagccatggccacacagcacacatgtggagcagcggctctccctggaaagctccaggcctgaatggatggactcagcgactgcaccagtggcagctggtgactgtggacagtggtggaccctgcttctgtgcacctgctgcaggctctttttatgaaggctttcatgaattttagtatgtaatacgcactgacgacacatgatgcttggatgacagatgagaggggatggctgagtcctgtggctggcccgtgatgccaggtggcccatgtgcccagggcgcctgcagggctgctacagggacctggtcaggaggtgcacatggtgccctgccctcacccaccctctgtgtttccccttctttgaaaaggtagaagagaaaggaatattttaaacctttttggcttaaacagaattttagcatcagaactagctttctgggattggaggcaaaccatcaaggtggtccctctccagtctggacacgatgccagcaaggatgacgtcctgccacctcctggagttaccctggcctcctagggtccctttttctgatgaagtcttaattccctaaaagcgcctctttggacactgaggccctctctgcctttcctggcctccggcaacagtttttttacaaagattttttgcagtcgagtccatatgtccacccattgatttttaaagcttttgtgatattttagcattttgaaagactttcacagtgagagtagaaggtagatttggaatcatacattttagcaagtggacttgttgaaacaggaagcaagggccttcagtgtagcccattcttgatccagagctgttgcctgtgacagcggtttctctggatgtcaaaggcagctgcctggtgcccagcttgcttctcgactggtggcccctatgggtgggtgtgcgatggaaatgtgttcctgccggagtctgaggcaccagggtgtgctcaaaggctggccctggtggtggactggcacctgtgcagagtgccgtgtgcttgtggtgcgccatctgaagcaagagtccagcgttctgccgtgtctgtcccccaccatgccccctacaggcggtactgatggcgcttttttttttttttttctgtcaggaaaacaatgttggcctgtgggccgcccacaacatatccttccctcactacctgtgtgaccaaggttggcttctgttgaccttttaaaaaagaaaccctcaactcaaattgctataattagacacttgcttctgtcttgcctcctgtctgcagctgtgaatagtcatttgactgtgactgttgcccttagccagccagatgcgcctgtgaaccaaagcttcgtgcacatgtgttcccctaaaggttggggagcctcgctgtgtcttgctgttcccaggcaccaccacagcaggtgctgccatactcttgtggtctctgtgcgccccccccccccccacccgtctgccaagcatgggtatgaatcgtgcacacagccatgcttcaaggccggggcaggggagcctgtgctgatgccatccagggcactgggctgtgcctggaaggcgagccttgattgtctgaacacataaagcaaactgtccagaag

SEQ ID NO: 38 - protein, 773 aa, Homo sapiens
METDESPSPLPCGPAGEAVMESRARPFQALPREQSPPPPLQTSSGAEVMDVGSGGDGQSELPAEDPFNFYGASLLSKGSFSKGRLLIDPNCSGHSPRTARHAPAVRKFSPDLKLLKDVKISVSFTESCRSKDRKVLYTGAERDVRAECGLLLSPVSGDVHACPFGGSVGDGVGIGGESADKKDEENELDQEKRVEYAVLDELEDFTDNLELDEEGAGGFTAKAIVQRDRVDEEALNFPYEDDFDNDVDALLEEGLCAPKKRRTEEKYGGDSDHPSDGETSVQPMMTKIKTVLKSRGRPPTEPLPDGWIMTFHNSGVPVYLHRESRVVTWSRPYFLGTGSIRKHDPPLSSIPCLHYKKMKDNEEREQSSDLTPSGDVSPVKPLSRSAELEFPLDEPDSMGADPGPPDEKDPLGAEAAPGALGQVKAKVEVCKDESVDLEEFRSYLEKRFDFEQVTVKKFRTWAERRQFNREMKRKQAESERPILPANQKLITLSVQDAPTKKEFVINPNGKSEVCILHEYMQRVLKVRPVYNFFECENPSEPFGASVTIDGVTYGSGTASSKKLAKNKAARATLEILIPDFVKQTSEEKPKDSEELEYFNHISIEDSRVYELTSKAGLLSPYQILHECLKRNHGMGDTSIKFEVVPGKNQKSEYVMACGKHTVRGWCKNKRVGKQLASQKILQLLHPHVKNWGSLLRMYGRESSKMVKQETSDKSVIELQQYAKKNKPNLHILSKLQEEMKRLAEEREETRKKPKMSIVASAQPGGEPLCTVDV

SEQ ID NO: 39 - DNA, 2081 bp, Homo sapiens
ggctccgggggcggactcccgccgcccagctgacacgcgattcgtcactcttgcagaactttccccctgaaaatccctgcaccagaacccgctctcccgccccggggaggttttgattttagtggctttcttccttttattttccgtcgtgtgcggatttcgctgcagagcgaacttgcggctcgtccgagtacatgtgagcggtaatcgcccctgcagctggttatcctgacattatgcactccgaagcagaagaatccaaggaagtggccacagatgtctttaattccaaaaacctggccgttcaggcacaaaagaagatcttgggtaaaatggtgtccaaatccatcgccaccaccttaatagacgacacaagtagtgaggtgctggatgagctctacagagtgaccagggagtacacccaaaacaagaaggaggcagagaagatcatcaagaacctcatcaagacagtcatcaagctggccattctttataggaataatcagtttaatcaagatgagctagcattgatggagaaatttaagaagaaagttcatcagcttgctatgaccgtggtcagtttccatcaggtggattatacctttgaccggaatgtgttatccaggctgttaaatgaatgcagagagatgctgcaccaaatcattcagcgccacctcactgccaagtcacatggacgggttaataatgtgtttgatcatttttcagattgtgaatttttggctgccttgtataatccttttgggaattttaaaccccacttacaaaaactatgtgatggtatcaacaaaatgttggatgaagagaacatatgagcacatgagttaagattgtgactgatcatgatttatttgaagatggagcactgctgatttatgaaggaaaaaagaagaattttctaaagattacacatatttcagaaagactttacccaattcagttgtcagacataatgatttatttgaaggcttgttttatttgaagaaaagcatattgccaaaaattctggttaaaagcttcctaacgggtaacagaccatgggagagatatgtggttgggtaatgcaaatgtagttatacaaagaaaaatacagatgtctccagacctgaggactttttaatagggcagttgttgtgttggtggcacattggatatttctaacatgtacaaagctatgtattttgatttactttcatttcttgctatgtatatgtacttttcttaaaatgccaagaactttctcttgctatcattgctccttttgaaacaattcaattttcatgtctacagctgactgttttgttaagattgagtcatcgacattcaggatttaagtctgaggtagtcaaccctcaggaaaaaaaaaatggcttatctgaaatcagtactgtggaaatgaactatattagctattatgaataatgtccagtataagaatatgcttctggaattgagttctccttttaagtaccaatgatacttaaatttctcagaaatgtaatggtgtgtcattgccttgaaatgcttgcttagggcttcttttatgttatcttaaaaagtgctggtgaattttccattttttacatccatttcacatgtaagagacaaaaaagtctagattggtcttgatattgagataataaaaagtaagtagcattaagaaaggtaacaatcttcattctacagatgaactcattgaaacaatttaggggaatgaggggcaaaaggggagaaatactgctaaagaacatgagcataaaaatgcgtgcgtttcagtgtttaagaaggcttgataaagaatgtcacttttttatttaactgataagatttttgttattttttactttgataagtaaaccaaagaatatttgtatttcaagcagtttgtgtggtgtttctatataattttctgtgtataaataataaagtaggcatttgtttattttgtaaaaaagaaatgaaaatctgctggccagctatgtcctctaggaaatgacagacccaaccaccagcaataaacatttccattgtcgaaaaaaaaaaaaaaaaaaaaaaaaaaaaaa

SEQ ID NO: 40 - protein, 198 aa, Homo sapiens
MHSEAEESKEVATDVFNSKNLAVQAQKKILGKMVSKSIATTLIDDTSSEVLDELYRVTREYTQNKKEAEKIIKNLIKTVIKLAILYRNNQFNQDELALMEKFKKKVHQLAMTVVSFHQVDYTFDRNVLSRLLNECREMLHQIIQRHLTAKSHGRVNNVFDHFSDCEFLAALYNPFGNFKPHLQKLCDGINKMLDEENI

SEQ ID NO: 41 - DNA, 3984 bp, Homo sapiens
ctgctgactgtttcttcggatgcattttttggtgtgctcttgagggattaaatgcaaagagatcacaccatggactacaaggaaagctgcccaagtgtaagcattcccagctccgatgaacacagagagaaaaagaagaggtttactgtttataaagttctggtttcagtgggaagaagtgaatggtttgtcttcaggagatatgcagaggttgataaactttataacactttaaaaaaacagtttcctgctatggccctgaagattcctgccaagagaatatttggtgataattttgatccagattttattaaacaaagacgagcaggactaaacgaattcattcagaacctagttaggtatccagaactttataaccatccagatgtcagagcattccttcaaatggacagtccaaaacaccagtcaggtccatctgaagatgaggatgaaagaagttctcagaagctacactctacctcacagaacatcaacctgggaccgtctggaaatcctcatgccaaaccaactgactttgatttcttaaaagttattggaaaaggcagctttggcaaggttcttcttgcaaaacggaaactggatggaaaagtttatgctgtcaaagtgttacagaaaaaaatagttctcaacagaaaagagcaaaaacatattatggctgaacgtaatgtgctcttgaaaaatgtgaaacatccgtttttggttggattgcattattccttccaaacaactgaaaagctttattttgttctggattttgttaatggaggggagctttttttccacttacaaagagaacggtcctttcctgagcacagagctaggttttacgctgctgaaattgctagtgcattgggttacttacattccatcaaaatagtatacagagacttgaaaccagaaaatattcttgtggattcagtaggacatgttgtcttaacagattttgggctttgtaaagaaggaattgctatttctgacaccactaccacattttgtgggacaccagagtatcttgcacctgaagtaattagaaaacagccctatgacaataccgtagattggtggtgccttggggctgttctgtatgaaatgctgtatggattgcctcctttttattgccgagatgttgctgaaatgtatgacaatatccttcacaaacccctaagtttgaggccaggagtgagtcttagagcctggtccattctggaagaactcctagaaaaagacaggcaaaatcgacttggtgccaaggaagactttcttgaaattcagaatcatcctttttttgaatcactcagctgggctgaccttgtacaaaagaagattccaccaccatttaatcctaatgtggctggaccagatgatatcagaaactttgacacagcatttacagaagaaacagttccatattctgtgtgtgtatcttctgactattctatagtgaatgccagtgtattggaggcagatgatgcattcgttggtttctcttatgcacctccttcagaagacttatttttgtgagcagttgccatacagaaaccattgagcaaaataagtctatagatgggactgaaacttctatttgtgtgaatatattcaaatatgtataactagtgcctcatttttatatgtaatgatgaaaactatgaaaaaatgtattttcttctatgtgcaagaaaaatagggcatttcaaagagctgttttgattaaaatttatattcttgtttaataagcttatttttaaacaatttaaaagctattattcttagcattaacctatttttaaagaaacctttttgctattgactgttttttccctctaagtttacactaacatctacccaagatagactgttttttaacagtcaatttcagttcagctaacatatattaatacctttgtaactctttgctatggcttttgttatcacaccaaaactatgcaattggtacatggttgtttaagaagaaaccgtatttttccatgataaatcactgtttgaaatatttggtcatggtatgatcgaaatgtaaaagcataattaacacattggctgctagttaacaattggaataactttattctgcagatcatttaagaagtaacaggccgggcgcgggttgtcacgcctgtaatcccagcactttgggaggctgaggcgggcagatcacctgaggtcaggagttggagaccagcctgaccaacatggacaaaccccgtctctactaaaaatacaaaattggcagggtgtggtgcacatgcctataatcccagctacttgggaggctaaggcaggagaatcgcttgaacccgggaggcggaggttgcagtgagccgagatcgcaccattgcactcctgcctgggcaacaagagtgaaactccatctccaaaaaaaaaaaggaaaaagtaacaaaaggaaattatttgtttttgaaataccagttcaactttgtggattatttttcctctgaaggaaaagaaaaggcttaatggttaggatttttaagtattcccaaagatctgaagggtaataaaatgtactggattttttaaggtggtaccaaaaatgaatgtctgtcatatatttatattacaaatacattatatttatgttctattcatcttttgaatgtttagtatgctattaagtcattctgaatctttgtatttgcttttgcaaataggtatttcaaagctcttttcctaactggttaagtaaaataaaaaattgagctttctagaatatttgcctaattgggaattaaaaagtaaaataataggccaggcatggtggctcatgcctataagcaccctgggaggccgaggcaggcagattatttgagctcaggagtttgagaccatcctgggcaacatggcgaaaccctatctctacaaaaaatacaaaaattagccagacatggtggcacatgcctttagtcccagctactcaggaggctgaagttggaggatggcttgagcccacgagatggaagttgcagtgaactgaaattgtgccactgcacttttcagcctgggtgccacagcgagaccctagttaagagaaaaaaaaagtaaaaacaaattgtgggtcaaagtaaatgtatacagttttattacaatgtaacaaaagttgaaaatcgggcccggaatttatccaatttcagatatatcttagaaaaagcacaggaaacagaccttaaaattgtaacctaccaactaacttacatgcttataaaagtaaaggagaataactggccgggcacggtggctcatgcctataaaattccagcactttgggaggccaaggcaggaggatcacttgagcctatgagttcaagaccagcctaggcaatgtagtgacacctcatttctatttattttaaaaaaaagagagagtaactacagaagaactttaaaaaataaaaaataagcttaccttggattcttggcttagagtagaggttttttttaagttatggaggaaacatttttgtaaaagtttaatgacccactttagatgctccaagaacaagcatcccttccatgtatgtcttgagaaagaaatcacagaagcatttctcaccaatactctttggcttaaaatgttcagcagaattgggcagtgggggtgacttttcttatattaataatatttacatccaatacactgaatcttcctttagaggtaagactttaatatctatactgtaaatatttggtttatttggcactactgtaagttttgtttttcacaaagctcttattatgaagcaaaataaaaattctagtttcttgtatgattttttgtactcattcattcctgttaagctgccaaaaattaaagtgcaatattgtatatttttaagaacaaatttaaaatagaattttgatgtttctcagatcacaagaaatacaaatctatatagtataataaaatcagcaaaagatcaaaaaaaaaaa

SEQ ID NO: 42 - protein, 496 aa, Homo sapiens
MQRDHTMDYKESCPSVSIPSSDEHREKKKRFTVYKVLVSVGRSEWFVFRRYAEVDKLYNTLKKQFPAMALKIPAKRIFGDNFDPDFIKQRRAGLNEFIQNLVRYPELYNHPDVRAFLQMDSPKHQSGPSEDEDERSSQKLHSTSQNINLGPSGNPHAKPTDFDFLKVIGKGSFGKVLLAKRKLDGKVYAVKVLQKKIVLNRKEQKHIMAERNVLLKNVKHPFLVGLHYSFQTTEKLYFVLDFVNGGELFFHLQRERSFPEHRARFYAAEIASALGYLHSIKIVYRDLKPENILVDSVGHVVLTDFGLCKEGIAISDTTTTFCGTPEYLAPEVIRKQPYDNTVDWWCLGAVLYEMLYGLPPFYCRDVAEMYDNILHKPLSLRPGVSLRAWSILEELLEKDRQNRLGAKEDFLEIQNHPFFESLSWADLVQKKIPPPFNPNVAGPDDIRNFDTAFTEETVPYSVCVSSDYSIVNASVLEADDAFVGFSYAPPSEDLFL

SEQ ID NO: 43 - DNA, 4656 bp, Homo sapiens
aagatggctgcccacgggggctccgcggcgtcctcggcgctgaaggggttaattcaacagttcaccaccattaccggtgcaagtgaaagtgtaggaaaacatatgcttgaagcgtgcaacaataatctggaaatggcagtcactatgtttttggatggtggaggaatcgctgaagagcccagtaccagttcagcaagtgtctctactgtcagaccacacacagaagaagaagttcgtgccccaattcctcaaaagcaggaaatactggtggaaccagaaccattatttggtgctcctaaaagacgacggcctgcacgttcaatttttgatggtttccgggattttcagactgaaactattcggcaagaacaagaattaagaaatggaggagctatcgataagaaattaactacccttgcagatctattccggccacccattgatttgatgcataaaggcagctttgaaacagccaaagagtgtggccagatgcaaaataagtggctgatgataaacattcaaaatgttcaagactttgcatgtcagtgcctcaaccgcgatgtgtggagcaacgaagctgtgaagaatattatccgggaacatttcattttctggcaggtttatcatgacagtgaggaaggtcagagatacatacagttttataagttaggggatttcccctatgtttccatattggacccacggacaggtcagaagctagtagaatggcaccagttagatgtatcttctttcttggaccaagtgacgggatttctgggtgaacatggacaactggatggactttctagcagtccccccaaaaaatgtgcccgttcagagagccttatagatgcaagtgaagacagccagctagaagctgccatcagagcctccttacaagaaacacattttgattcaacacagacaaaacaggatagccgctcagatgaagaatctgaatctgaacttttttctggcagtgaggagttcatatccgtttgtggctctgatgaagaagaagaggtagagaatcttgccaagtccagaaagtctccccacaaagatttggggcatagaaaagaggagaatagaaggccgctgactgagccaccagtcagaactgatcctggaacagccacaaaccaccaaggattgccagctgtggattcagagatactggagatgccacctgaaaaagcagatggagtagtggaggggatagatgtaaatggaccaaaagcacagctgatgttgcggtatccagatggaaaaagggaacagatcactcttccagagcaagctaaactgctagctttggtgaagcacgtgcagtctaaaggatacccaaatgaacgttttgaacttctcaccaactttcctcgaaggaaattatctcatctggactatgatattacattgcaagaggcaggcctttgtcctcaagagactgtctttgtacaggaaagaaattaacaccatggcttgacctctctcagcttaccccttttttcccttttcctgtgagatacatgtcactaagtatgcattttggctcataggaccacagagccaaagttgggcaagcaagtcaccttccttctcttatttcttgatctctcctataatcagtctctttctccccctttgtttctttctcctcttctgttttctcgctccccactccgtacccttctgcctccccctccccccacacttttctttcttacctaatctggtgaccaaactgaagtgtaaggataagacctctcctagtactagcagcaggaattgtgtgttccagtaagtggtctcttgcacggcacttttttgggatcaaatgttaacgttactccccagactcttcgggcaaaggaatggctagattcagagtaagaacaaccctcccttttttgtaagtccccgtgtttagcagggagaagaaattctctaacatgggtttggttttgttgtgttcttcatgtggaaatgtcgcttaacaaaatatccaggcttttgtttacgtggaaaaagcatcccttgtaatgattgctcatcatacttaaaaacctttttcaaaggattttcatgttcccagctataaggactatttccatgacgtgttattggcagaatgagtgttaaatatggagcatatagcatggggtgactttcattgtcctaacctgagacagttttccttattactctgtattgatcctgctagtccaagaatggacatgaagtgaacctatcgtggtgactgggataggaaggtgcttgctatttttgccagcacagcatattagttcctttggagccctccattgtctgagtctgcagtgatctgtaggaaggcagctggtcaataatcatgtagtacaatggcttggaattgtaaccactatggttattgattgtcctgtgttgtttcaggcatacttaggtatgtccctggggaaaaagaaaaccattcagctgagagttgctaaccatgttcttttggttagaaataatggttcattttttgcccctggttggaatagtctctaaaaggctctggtgactgaattgaacatgagtccgcatgctgttttctttcaaaaggtatcaaaacggaaagcctctctaaggggaagacctttcaactccattcagaagacaacatttagtaaggaggatggcggaggttactagtaattttcagatgtcttgggctttttctgccaacaaaacccaaaatcaaattagagttggtgaaagctttcttcagtgtttttagaagaggccatcttgaatctgtagaataccatttacacatcaacttcaccctatgctcatttcgtattttgagcttaaatggagtcctctgaagggggggtagtcgtgattctggtggcaaaactagaacttttaacttgtaaaatgaaaaatattaaatggacctttttgtcagttgaggatttagattgattcttttatctgaggagcgtatgttcctcagatgttgcgtagagacctttaggttttcatctactttaagattgctctcttggcaattaggggatttgggaaaagaagaaaaaaagatgccatgtgttgctagtacacagttataggatatggtttctaatggttgaattttgaggaactctccctaaagaatgagttttatatctcctcaaggaaatcatggaaaaatctgtttattcttcagtgagtccttttgaattaatgttcttaaatttttttctaagtctgtgtaagtgcttatgtataagtatataattgtataaatatttataaatatatttatataattacggtttcatttctaccttgagtcaaagttctgtctttagattggtgactgagtaatacttacactttggtgttttttcttaggttcttgaggcttacttaactagcagcttctgatttattgagtgaaagatggttttcatgttaattcctcagttgcatctctgaacttggataacatacttgccgtttgaaaaatagagctgtatactgtcaaaggtgcactggagggtaaaacatttgttggtagtagacaagctcagaaatccaaaaattcagggagggcacagggtaagaagagaggtttgctcagctttgtgctctgatggcacccatctgtactccagcaaagtcatagctgaagcccaaatcgctcaaacgtgtgaagtcaatcatttttcctatagggctctgtttccttttctttaccttctagcttctcttgataaaacagttgggagaactgccaacgtgttcatcagtgagagggtgtggttctttccgatatgttcagcacgtgcatattcatttatgagaaaccaaagtaacttcttcaactcgggttactgtgggatgattaagtagatataaagtgatttaaaagacagcatggtactttcactcagcttaacatgcagctgggatgtctacaatacaagatgtggtgggttttattttattttattttgaggcaggagtgtaattatcttagggttgatataaaggcccatgggaagagttacggattgtacatgggaagaatccataaggagtattgccttgctcaagaatttaatccgctgacagtatgcttcttccagtttgccttacttcctctgcaagtttctttgctccttagggcagaggttttattgaatagattaaatgaggtcagtaagattagttaaaaatagtcattccttgtgggtgttggacacagcttgaaaggagtgtttaaaaaaaaaaagctagggaggaaaagaacaagaaagatagacttcgagagtgataagagaaaaatacagggagatggaatggaaactaccaggaaggccgggcgcggtggctcatgcctgtaatcccaacactttgggaggcggaggtgggcagatcacctaaggtcaggagatcgaggccagcctgagcaacatggtgaaaccccgtctctactaaaaatacaaaaattacctgggtgtggtggcgtgcacctgtaatcccagctactcagaggctgaggcaggggaatggcttgaacctgggaggcagaggttgcagtgagccaagatcgcaccattacactccagcctgggcgacaaagcgacactccatctcaaattt

SEQ ID NO: 44 - protein, 490 aa, Homo sapiens
KMAAHGGSAASSALKGLIQQFTTITGASESVGKHMLEACNNNLEMAVTMFLDGGGIAEEPSTSSASVSTVRPHTEEEVRAPIPQKQEILVEPEPLFGAPKRRRPARSIFDGFRDFQTETIRQEQELRNGGAIDKKLTTLADLFRPPIDLMHKGSFETAKECGQMQNKWLMINIQNVQDFACQCLNRDVWSNEAVKNIIREHFIFWQVYHDSEEGQRYIQFYKLGDFPYVSILDPRTGQKLVEWHQLDVSSFLDQVTGFLGEHGQLDGLSSSPPKKCARSESLIDASEDSQLEAAIRASLQETHFDSTQTKQDSRSDEESESELFSGSEEFISVCGSDEEEEVENLAKSRKSPHKDLGHRKEENRRPLTEPPVRTDPGTATNHQGLPAVDSEILEMPPEKADGVVEGIDVNGPKAQLMLRYPDGKREQITLPEQAKLLALVKHVQSKGYPNERFELLTNFPRRKLSHLDYDITLQEAGLCPQETVFVQERN

SEQ ID NO: 45 - DNA, 6305 bp, Homo sapiens
cggacgcgtgggttggattttttccgtggatctatcaattcacaattcgaatttggaagaaagaaggaaaacatgacgtctccagccaaattcaaaaaggataaggagatcatagcagagtacgatactcaggtcaaagagatccgtgctcagctcacagagcagatgaaatgcctggaccagcagtgtgagcttcgggtgcaactgttgcaggacctccaggacttcttccgaaagaaggcagagattgagatggactactcccgcaacctggagaagctggcagaacgcttcctggccaagacacgcagcaccaaggaccagcaattcaagaaggatcagaatgttctctctccagtcaactgctggaatctcctcttaaaccaggtgaagcgggaaagcagggaccataccaccctgagtgacatctacctgaataatatcattcctcgatttgtacaagtcagcgaggactcaggaagactctttaaaaagagtaaagaagtcggccagcagctccaagatgatttgatgaaggtcctgaacgagctctactcggtgatgaagacatatcacatgtacaatgccgacagcatcagtgctcagagcaaactaaaggaggcggagaagcaggaggagaagcaaattggtaaatcggtaaagcaggaggaccggcagaccccacgctcccctgactccacggccaacgttcgcattgaggagaaacatgtccggaggagctcagtgaagaagattgagaagatgaaggagaagcgtcaagccaagtacacggagaataagctgaaggccatcaaagcccggaatgagtacttgctggctttggaggcaaccaatgcatctgtcttcaagtactacatccatgacctatctgaccttattgatcagtgttgtgacttaggctaccatgcaagtctgaaccgggctctacgcaccttcctctctgctgagttaaacctggaacagtcgaagcatgagggtctggatgccatcgagaatgcagtagaaaacctggatgccaccagtgacaagcagcgcctcatggagatgtacaacaacgtcttctgcccccctatgaagtttgagtttcagccccacatgggggatatggcttcccagctctgtgcccagcagcctgtccagagtgagctggtacagagatgccaacaactgcagtctcgcttatccactctaaagattgaaaacgaagaggtaaagaagacaatggaggccaccctgcaaaccatccaggacattgtgactgtcgaggactttgatgtgtctgactgcttccagtacagcaactccatggagtccgtcaagtccacggtctctgaaaccttcatgagcaagcccagcattgctaagaggagagccaaccagcaagagacagagcagttttatttcacaaaaatgaaagagtacctggagggcaggaacctcatcaccaagttacaagccaagcatgaccttctgcagaaaaccctgggagaaagtcagcggacagattgcagtctagccaggcgcagctcaactgtgaggaaacaggactccagccaggcaattcctctggtggtggaaagctgtatccggtttatcagcagacacggactacagcatgaaggaattttccgggtgtcaggatcccaggtggaagtgaatgacatcaaaaatgcctttgagagaggagaggaccccctggctggggaccagaacgaccatgacatggattccatagctggtgtcctgaagctttacttccgggggctggaacaccctctcttccccaaggacatctttcatgacctgatggcctgcgtcacaatggacaacctgcaggagagagctctgcacatccggaaagtcctcctagtcctgcccaaaaccactctgattatcatgagatacctctttgccttcctcaatcatttatcacagttcagtgaagagaacatgatggacccctacaacctcgccatctgcttcgggccctcgctaatgtcagtgccagagggccacgaccaggtgtcctgccaagcccacgtgaatgagctgatcaaaaccatcatcatccagcatgagaacatcttcccaagccccagggagctggagggccctgtctacagcagaggaggaagcatggaggattactgtgatagccctcatggagagactaccccggttgaagactcaacccaggatgtgaccgcagagcaccacacgagcgatgacgaatgtgagcccatcgaggccattgccaagtttgactacgtgggccggacagcccgagagctgtcctttaagaagggagcatccctgctgctttaccagcgggcttccgacgactggtgggaaggccggcacaatggcatcgacggactcatcccccatcagtacatcgtggtccaagacaccgaggacggtgtcgtggagaggtccagccccaagtctgagattgaggtcatttctgagccacctgaagaaaaggtgacagccagagcgggggccagctgtcccagtgggggtcatgtagccgatatttatcttgcaaacatcaacaagcaaaggaagcgtccagaatctgggagcatccggaaaacttttcggagtgacagccatgggctgagcagttccctgactgactcctcctccccaggggtgggggctagctgccgcccatcctcccagcccatcatgagccagagcctccccaaagaagggccagataagtgttccatcagtgggcacgggagcctcaactccatcagccgccactcatccctgaagaatcggctggatagtccacagatccggaagactgccacagcgggaaggtcaaaaagcttcaataaccatcggcccatggaccctgaggtcattgctcaggatattgaggcaacaatgaactcggccctgaatgagctacgggaactagaacggcagagcagtgtcaaacacacccctgacgtggttctggacaccttggagcccctcaaaacctccccagtggtggcccccacgtcagagccctccagccctctgcacacccagctcctcaaggaccccgagcccgccttccagcgcagcgccagtactgctggggacatcgcctgcgccttccggcctgtcaagtctgtcaagatggctgccccggtcaaaccaccagccacacggcccaagcccactgtcttccccaaaacaaatgccactagccctggtgtcaactcatcaacttccccacagtctactgacaagtcttgtactgtctgagggataataatttaattgttctagacaaggggactatagggactgactgttattaaaatcttcctatttaactagcttggggacttcagttgaaaattaggttctaagttgttcttgcaggaattagcctccccgtctcccaaaaccttgagaatgaagcccttggtatcgcctctcccttcccactgccctctgcttcccccagtcgtcgtaattcagccagctgcagtccgtaccgttcttaggttagccagagacaggttttcattatcaggtcactgtgaaatctggtaaggcagtcctgaggacatgggctcaagtctcagtcccctcagaccacggtgatgccttgaccagatggttggctactgccatccagctttcagtggcatcttgttttgggaactgattatagagaatcatatatagtccagtcttcattttacatacacacacatattttacacacacacacattttacacacacacacacacacacacacacacacatatgtttttctagtctctggcatgtgtagcctctcctggtcatagaccagtctctttgtaagttattgtggcagttcacacagtagccaccaggggtctctgtttccattacaaactttgttctgtctgggccagagaacctagcctttgaaatctctccatcatgtgaaacataacgggatgggacaatcccgtaacctgtttggggttgggggctttctctctgtgttctttccattgatgtgaattggtcattggtgtttgctcttgcctctcctccatcccctagaagtacacccccgtcttattaaggagcttttaaagtttttctgaatgtatagacatttctcgggttcctacctttgtctctgatggaccattttccatttaagacattttcctgtataagacagttttatagctggttccttttagggtaaagagtcttaagagagttttattgtgtctatggcaggtttgggaaaggtaagaaatgggtcctttttcctcctaatgtttttggcacttaaaacataaaattcattatcctattaaaaaattaaattcagctttgctaatccagaaattgttcccaaatgaaaacttgttttaagtccaccccttagtttccttattttacaaggtctctcttcagggaccaacaggggcttagagagccttagttagattaaagggagaccctacctcttaaaaccagttttcatttatgcaaacaaggacaattaagggaaccctgaccccacaggctctcaagtcttcccaaggccagaatcgaaagaaaattaaaatttgaatgctgaatattctggctctactctggccttttttctggttcccttccaaaatgcacaaatcatacccttgtctgctccaattcagtctccaaacctggtgcctgtgctcctggcccccctagcatcatgctatcccaggagtatcaggaccagacacatccacagccaggctcatgggtctcagacagcaacttgagttaaagctgaaactcatccttcttctctgtgttttctggtttaaaagctgcacttatattttagccttattattttctgtagttccggagagatggtgggttgccattctggtaggaaaatctgagttttcttatctttgacctagaagagattctttttggaccaacctgcgaaattggtagttaggtctatggaaagtggtaggatttttttttttttaatcctgtgcaaaggaaaagaggtgctttgtgggaaatcactaatgagaaggctaacctgcagcaccagagaaacctttccaagtgctaggcaggagaactgaagaactctttcagtgaagtgagtcagcctagaagaggcaacccacagtcttgatttttgttgctgtttcctgacctgttcttgcctgtcacctgggcctacacaggtcccgagccaacggggctttcatacccaaggatctgtttccttgctgaaaatgaaaccctatctttcactttacattcctttcaatccaactgatcaaaactggtacccacacttgccctttctccctctctccagcacactcccctctaagaaagtaaaagcaaagctttcttaatggcaacactttgggcctgttctgttgctcctgccttatttctctttcaaccctgtacatgactcgtgttcaccatccccttgatcagtgtccatccgcgctaatttgcatcatgaactgaacagtgtgtgagtggtcacctactaaacccagctctgggggcagagctgtcttccccatctctggtgctcctaacacctgtgagatggtcctgtcgagaggactaggaaccgataggaggagagtccttctcggcagagctcactgcaaacaactggaattgaggttgcacactgtgatttttacaccgaaaagccaaaaggagctggccatccagggcctagggagaccagccttcctcagctatgcttgccgaaaccagcatgatgcttcaaagagccctgctccacccctcatggcatggatccttttcctggtgtggactctgaagggtcagtcttcggggaagagaggtggggtggggctactagcatcccaatttagaaaatagaggagtttgtagccagcagcctgtaaactggaaacactggtctcagccaacctcctcagggcgccctggcttctccccaaggagatgaggagcggtgatgccagcaccgggatgcgcagagcactggaagggctggtgcagatctacttcccatgcagaagagaagtcacatcttccagggaatcgcaatgttgtggcgtctgacttgtatgtcacatttgtgtaaaatggtatattctttaaaatagtgttgataactggaatattgtatgtatgcttggagatgctttgtgtgaacctaagactgtcactcaacagatgttggattggggaaaatccaaagcacaacttcaaaataaaatacatttttaggtttcg

SEQ ID NO: 46 - protein, 1095 aa, Homo sapiens
RTRGLDFFRGSINSQFEFGRKKENMTSPAKFKKDKEIIAEYDTQVKEIRAQLTEQMKCLDQQCELRVQLLQDLQDFFRKKAEIEMDYSRNLEKLAERFLAKTRSTKDQQFKKDQNVLSPVNCWNLLLNQVKRESRDHTTLSDIYLNNIIPRFVQVSEDSGRLFKKSKEVGQQLQDDLMKVLNELYSVMKTYHMYNADSISAQSKLKEAEKQEEKQIGKSVKQEDRQTPRSPDSTANVRIEEKHVRRSSVKKIEKMKEKRQAKYTENKLKAIKARNEYLLALEATNASVFKYYIHDLSDLIDQCCDLGYHASLNRALRTFLSAELNLEQSKHEGLDAIENAVENLDATSDKQRLMEMYNNVFCPPMKFEFQPHMGDMASQLCAQQPVQSELVQRCQQLQSRLSTLKIENEEVKKTMEATLQTIQDIVTVEDFDVSDCFQYSNSMESVKSTVSETFMSKPSIAKRRANQQETEQFYFTKMKEYLEGRNLITKLQAKHDLLQKTLGESQRTDCSLARRSSTVRKQDSSQAIPLVVESCIRFISRHGLQHEGIFRVSGSQVEVNDIKNAFERGEDPLAGDQNDHDMDSIAGVLKLYFRGLEHPLFPKDIFHDLMACVTMDNLQERALHIRKVLLVLPKTTLIIMRYLFAFLNHLSQFSEENMMDPYNLAICFGPSLMSVPEGHDQVSCQAHVNELIKTIIIQHENIFPSPRELEGPVYSRGGSMEDYCDSPHGETTPVEDSTQDVTAEHHTSDDECEPIEAIAKFDYVGRTARELSFKKGASLLLYQRASDDWWEGRHNGIDGLIPHQYIVVQDTEDGVVERSSPKSEIEVISEPPEEKVTARAGASCPSGGHVADIYLANINKQRKRPESGSIRKTFRSDSHGLSSSLTDSSSPGVGASCRPSSQPIMSQSLPKEGPDKCSISGHGSLNSISRHSSLKNRLDSPQIRKTATAGRSKSFNNHRPMDPEVIAQDIEATMNSALNELRELERQSSVKHTPDVVLDTLEPLKTSPVVAPTSEPSSPLHTQLLKDPEPAFQRSASTAGDIACAFRPVKSVKMAAPVKPPATRPKPTVFPKTNATSPGVNSSTSPQSTDKSCTV

SEQ ID NO: 47 - DNA, 2216 bp, Homo sapiens
ggcaaactgtcatcaggagcttaaataggacagattttcacggcagtggatataccagcatggctattatctatggagtgttctctgcttcaaatttgattacaccgtcagtggttgccattgtaggacctcaactctctatgtttgccagtggtttattttacagcatgtacattgccgttttcatccagcctttcccgtggtccttctacacagacctctcggccggaatctccagggatgaccagcccctccccacgcatccagataatctccaccgactctgctgtagcctcacctcagcgcattcagattgtcacagaccagcagacaggacagaaaatccagatagtcaccgcagtggacgcctccggatcccccaaacagcagttcatcctgaccagcccagatggagctggaactgggaaggtgatcctggcttccccagagacatccagcgccaagcaactcatattcaccacctcagacaacctcgtccctggcaggatccagattgtcacggattctgcctctgtggagcgtttactggggaagacggacgtccagcggccccaggtggtagagtactgtgtggtctgtggcgacaaagcctccggccgtcactatggggctgtcagttgtgaaggttgcaaaggtttcttcaaaaggagtgtgaggaaaaatttgacctacagctgccggagcaaccaagactgcatcatcaataaacatcaccggaaccgctgtcagttttgccggctgaaaaaatgcttagagatgggcatgaaaatggaatctgtgcagagtgaacggaagcccttcgatgtgcaacgggagaaaccaagcaattgtgctgcttcaactgagaaaatctatatccggaaagacctgagaagtcccctgatagctactcccacgtttgtggcagacaaagatggagcaagacaaacaggtcttcttgatccagggatgcttgtgaacatccagcagcctttgatacgtgaggatggtacagttctcctggccacggattctaaggctgaaacaagccagggagctctgggcacactggcaaatgtagtgacctcccttgccaacctaagtgaatctttgaacaacggtgacacttcagaaatccagccagaggaccagtctgcaagtgagataactcgggcatttgataccttagctaaagcacttaataccacagacagctcctcttctccaagcttggcagatgggatagacaccagtggaggagggagcatccacgtcatcagcagagaccagtcgacacccatcattgaggttgaaggccccctcctttcagacacacacgtcacatttaagctaacaatgcccagtccaatgccagagtacctcaacgtgcactacatctgtgagtctgcatcccgtctgcttttcctctcaatgcactgggctcggtcaatcccagcctttcaggcacttgggcaggactgcaacaccagccttgtgcgggcctgctggaatgagctcttcaccctcggcctggcccagtgtgcccaggtcatgagtctctccaccatcctggctgccattgtcaaccacctgcagaacagcatccaggaagataaactttctggtgaccggataaagcaagtcatggagcacatctggaagctgcaggagttctgtaacagcatggcgaagctggatatagatggctatgagtatgcataccttaaagctatagttctctttagccccgatcatccaggtttgaccagcacaagccagattgaaaaattccaagaaaaggcacagatggagttgcaggactatgttcagaaaacctactcagaagacacctaccgattggcccggatcctcgttcgcctgccggcactcaggctgatgagctccaacataacagaagaacttttttttactggtctcattggcaatgtttcgatagacagcataatcccctacatcctcaagatggagacagcagagtataatggccagatcaccggagccagtctatagcgcaaaccacacacctgccaaggagcaacagaatccttccaggaccgttcacatacaaagaaagtagtggtattttggtatgtgcaaatatttccatatgttagccatttcctgtctggtttctccttatctgttaatcccagacaatagcaattaaaaagactagtaggatcctttcctgacat

SEQ ID NO: 48 - protein, 596 aa, Homo sapiens
MTSPSPRIQIISTDSAVASPQRIQIVTDQQTGQKIQIVTAVDASGSPKQQFILTSPDGAGTGKVILASPETSSAKQLIFTTSDNLVPGRIQIVTDSASVERLLGKTDVQRPQVVEYCVVCGDKASGRHYGAVSCEGCKGFFKRSVRKNLTYSCRSNQDCIINKHHRNRCQFCRLKKCLEMGMKMESVQSERKPFDVQREKPSNCAASTEKIYIRKDLRSPLIATPTFVADKDGARQTGLLDPGMLVNIQQPLIREDGTVLLATDSKAETSQGALGTLANVVTSLANLSESLNNGDTSEIQPEDQSASEITRAFDTLAKALNTTDSSSSPSLADGIDTSGGGSIHVISRDQSTPIIEVEGPLLSDTHVTFKLTMPSPMPEYLNVHYICESASRLLFLSMHWARSIPAFQALGQDCNTSLVRACWNELFTLGLAQCAQVMSLSTILAAIVNHLQNSIQEDKLSGDRIKQVMEHIWKLQEFCNSMAKLDIDGYEYAYLKAIVLFSPDHPGLTSTSQIEKFQEKAQMELQDYVQKTYSEDTYRLARILVRLPALRLMSSNITEELFFTGLIGNVSIDSIIPYILKMETAEYNGQITGASL

SEQ ID NO: 49 - DNA, 4210 bp, Homo sapiens
atggcggccggcaagagcggcggtagcgcaggggagattacttttctggaagctttggctagatcagagtctaagagagatggaggttttaaaaataattggagctttgatcatgaagaagaaagtgaaggagatacagataaagatgggacaaatctgctcagtgtggatgaagatgaggattctgaaacctcaaaaggaaaaaagttaaatcgtcgatctgaaattgttgctaatagctctggtgaattcatcttgaagacatatgtaagacgaaacaagtctgaaagttttaaaactttgaaaggcaacccaattggacttaacatgttgagcaacaataagaaattgagtgaaaatatgcaaaatacgtcattatgttctggaactgtagttcatggtagacgttttcatcatgctcatgcacagataccagtagtaaaaacagcagcccaaagcagtctggaccgaaaagaaaggaaagaatacccacctcatgtccaaaaagttgaaattaatcctgtaaggttaagtcggctccaaggtgttgaacgtataatgaagaaaacagaagagtccgaatcacaagtggagcctgaaattaagaggaaagtacaacagaaacggcactgtagtacctatcagcctactcctcctctatctcctgcttcaaaaaaatgtttaacccatttagaggatttgcaaagaaattgcagacaagctattactttgaatgagtctactggaccattattaagaacgtcaattcatcagaattctggaggacagaagtcacaaaacacaggattaacaaccaagaagttttatggcaacaatgtggaaaaggttccaattgatattattgtgaattgtgatgacagtaaacacacttatttacagactaatggaaaagtcattttacctggggcaaaaatacccaaaatcacaaacttgaaagaaaggaaaacaagtttgtcagacctaaatgatccaatcattttgtccagtgatgatgatgatgacaacgacagaactaacagaagagaaagcatatctcctcagcctgctgattcagcatgttcttcccctgcaccatccactggaaaagtagaagcagcactaaatgaaaatacttgcagagcagagcgtgaactacgaagcattccagaagactcagagttaaatacagttacattgccaagaaaagcaagaatgaaagaccagtttggcaattctattatcaacacacctctgaaacgtcgtaaagtgttttctcaagaacctccagatgctttagctttaagctgccaaagttcctttgacagtgtcattttaaactgtcgaagtatacgagtaggaacactcttccggctgttaatagagcctgtaattttttgtttagattttatcaagatacagctagacgaaccagaccatgatcctgtagagattatattaaatacctctgatctaactaaatgtgaatggtgtaatgtccgaaaattacctgtagtgtttcttcaagcaattccagcagtttatcaaaagctgagcatccaactgcaaatgaataaggaggataaagtttggaatgattgtaaaggagtaaataaattaacaaatttagaagaacaatatataattttaatttttcaaaatggccttgatcctccggcaaatatggtatttgaaagtatcattaatgaaattggtataaagaataacatctccaatttttttgcgaaaattccctttgaagaagctaatggcagacttgttgcctgtacaagaacctatgaagagagcatcaaaggaagttgtgggcaaaaggaaaacaaaattaaaactgtatcatttgaatctaaaatacaacttagaagcaaacaagaatttcagttttttgatgaagaagaagaaactggagaaaaccacaccatcttcattggcccagtagaaaagttgatagtatatccaccacctccagctaagggaggcatctctgttaccaatgaggacctgcactgtctaaatgaaggagaatttttaaatgatgttattatagacttttatttgaaatacttggtgcttgaaaaactgaagaaggaagacgctgaccgaattcatatattcagttcttttttctataaacgccttaatcagagagagaggagaaatcatgaaacaactaatctgtcaatacagcaaaaacggcatgggagagtaaaaacatggacccggcacgtagatatttttgagaaggattttatttttgtaccccttaatgaagctgcacactggtttttggctgttgtttgtttccccggtttggaaaaaccaaagtatgaacctaatcctcattaccatgaaaatgctgtcatacagaaatgttcaactgtagaggacagttgtatttcttcttcagccagtgaaatggagagttgttcacaaaactcttctgccaagcctgtaattaagaagatgctaaacaaaaaacattgcatagctgtaattgattccaatcctgggcaggaagaaagtgaccctcgttataagagaaacatatgcagtgtaaaatacagtgtgaaaaaaataaatcatactgcgagtgaaaatgaagaattcaataaaggagaatctacatcccagaaagttgctgataggactaaaagtgagaatggcctacagaatgaaagtttaagttccacacatcatacagatggcttaagcaaaatcagactaaactatagcgatgaatcacctgaagctggtaaaatgcttgaagatgaactcgtcgacttctcagaagatcaggataaccaggatgatagcagtgacgatggattcctcgctgatgacaactgcagttcagaaataggacagtggcatttaaagcctactatctgtaaacaaccttgtatcctacttatggactcactccgaggcccttctcggtcaaatgttgtcaaaattttaagagagtatttagaagtggaatgggaagttaaaaaaggaagcaaaagaagtttttccaaagatgttatgaagggctctaatccaaaagtaccacagcaaaacaacttcagtgactgtggtgtatatgtattgcagtatgtagagagcttttttgagaatccaattctcagttttgaactacctatgaatttggcaaactggtttcctccaccaagaatgagaacaaaaagagaagaaatccgaaacataattctgaagctacaggaagatcagagcaaagagaaaagaaagcataaggacacttactcaacagaagcacctttaggcgaaggaacagaacaatgtgtcaatagtatctcagattgaccatttctgttacttgtcatttctactttcagaaactaaatgactttcaaatttgggtatagacaataaagaactgaagtgctcactactcagtgatttggaaattttgatgcttgtataaatgtcagataattaatttccaaaggcgtatgtattaagtaaaagtctgtaaatatgttaatgaggccaatttttccagcatttataattatttttttcacttgttaggaagcttttgttatgtattttctgttaatagtacctaaaattgcaacttctaaacccaaataaaaagaaaatatttataggaggaaatgattaatttgatattctttagtgaacttgtttaattcctcagtgggtgtgacatatttcatgggaatattcaaatatctatggtaatattttgaccctttatatttgttctaaaataagtcaaaatgtgaaaataatattaaatctaagatattttgaactaagcatctttatatgcttgtgtaacaggaacaaagtaacagcctttcaattcatatactgccttgtgttcagtgaacccaagaaatgtaataaatatttgtaattttacacaaatatttaagaggaaagagtattaagagcaattcaaaaaaagtaaccttatactactaaaaaaaaaattcttgcatatattatcatcaaatgcatttttgaagacatcaaagactcaggttaaaactattttggtaagtgcagcttgaatttcaaatatcccgtgttacctttctctattacagcttaaagtatgctacaatctgtgtcatatagttaattgataagcatttttaatctgtgtaaacacaggaatttaaataggaatttactatttttttat

SEQ ID NO: 50 - protein, 1112 aa, Homo sapiens
MAAGKSGGSAGEITFLEALARSESKRDGGFKNNWSFDHEEESEGDTDKDGTNLLSVDEDEDSETSKGKKLNRRSEIVANSSGEFILKTYVRRNKSESFKTLKGNPIGLNMLSNNKKLSENMQNTSLCSGTVVHGRRFHHAHAQIPVVKTAAQSSLDRKERKEYPPHVQKVEINPVRLSRLQGVERIMKKTEESESQVEPEIKRKVQQKRHCSTYQPTPPLSPASKKCLTHLEDLQRNCRQAITLNESTGPLLRTSIHQNSGGQKSQNTGLTTKKFYGNNVEKVPIDIIVNCDDSKHTYLQTNGKVILPGAKIPKITNLKERKTSLSDLNDPIILSSDDDDDNDRTNRRESISPQPADSACSSPAPSTGKVEAALNENTCRAERELRSIPEDSELNTVTLPRKARMKDQFGNSIINTPLKRRKVFSQEPPDALALSCQSSFDSVILNCRSIRVGTLFRLLIEPVIFCLDFIKIQLDEPDHDPVEIILNTSDLTKCEWCNVRKLPVVFLQAIPAVYQKLSIQLQMNKEDKVWNDCKGVNKLTNLEEQYIILIFQNGLDPPANMVFESIINEIGIKNNISNFFAKIPFEEANGRLVACTRTYEESIKGSCGQKENKIKTVSFESKIQLRSKQEFQFFDEEEETGENHTIFIGPVEKLIVYPPPPAKGGISVTNEDLHCLNEGEFLNDVIIDFYLKYLVLEKLKKEDADRIHIFSSFFYKRLNQRERRNHETTNLSIQQKRHGRVKTWTRHVDIFEKDFIFVPLNEAAHWFLAVVCFPGLEKPKYEPNPHYHENAVIQKCSTVEDSCISSSASEMESCSQNSSAKPVIKKMLNKKHCIAVIDSNPGQEESDPRYKRNICSVKYSVKKINHTASENEEFNKGESTSQKVADRTKSENGLQNESLSSTHHTDGLSKIRLNYSDESPEAGKMLEDELVDFSEDQDNQDDSSDDGFLADDNCSSEIGQWHLKPTICKQPCILLMDSLRGPSRSNVVKILREYLEVEWEVKKGSKRSFSKDVMKGSNPKVPQQNNFSDCGVYVLQYVESFFENPILSFELPMNLANWFPPPRMRTKREEIRNIILKLQEDQSKEKRKHKDTYSTEAPLGEGTEQCVNSISD

SEQ ID NO: 51 - DNA, 2109 bp, Homo sapiens
ttggcttgagcgggaccggagctgaggcaggaagagccggcgccatggtggagaaggaggaggctggcggcggcattagcgaggaggaggcggcacagtatgaccggcagatccgcctgtggggactggaggcccagaaacggctgcgggcctctcgggtgcttcttgtcggcttgaaaggacttggggctgaaattgccaagaatctcatcttggcaggagtgaaaggactgaccatgctggatcacgaacaggtaactccagaagatcccggagctcagttcttgattcgtactgggtctgttggccgaaatagggctgaagcctctttggagcgagctcagaatctcaaccccatggtggatgtgaaggtggacactgaggatatagagaagaaaccagagtcatttttcactcaattcgatgctgtgtgtctgacttgctgctccagggatgtcatagttaaagttgaccagatctgtcacaaaaatagcatcaagttctttacaggagatgtttttggctaccatggatacacatttgccaatctaggagagcatgagtttgtagaggagaaaactaaagttgccaaagttagccaaggagtagaagatgggcccgacaccaagagagcaaaacttgattcttctgagacaacgatggtcaaaaagaaggtggtcttctgccctgttaaagaagccctggaggtggactggagcagtgagaaagcaaaggctgctctgaagcgcacgacctccgactactttctccttcaagtgctcttaaagttccgtacagataaaggaagagatcccagttctgatacatatgaggaagattctgagttgttgctccagatacgaaatgatgtgcttgactcactgggtattagtcctgacctgcttcctgaggactttgtcaggtactgcttctccgagatggccccagtgtgtgcggtggttggagggattttggcacaggaaattgtgaaggccctgtctcagcgggaccctcctcacaacaacttcttcttcttcgatggcatgaaggggaatgggattgtggagtgccttggccccaagtgaactcaagatttggcagccccagagatgccaactgcagcatgcccacctgtattccctgtccccttccttcatgaaggcatctccaggcaaggaaaactgaagtcattggcccgatacaaaacatttcctgcaacgaaggaggtggtgccgacgtgctgcttcccatcaccagcagctgctcgacaaggggcgcagggtggctgtctttgttccagcactgttcaggctgcctgtcatcccgggcctgccagctcccctgagtgatgagcacttccaagcacccctctgccctttctctgtccttatgctgtcccggcctcgccagccctctggggcattgtgggagatgcctgccaggaatgagcaagctctgttgctcgggagcctcttgtcaccttcttggacttattccccacctgataccttatagagaaaagtgtgaattcaggtggagagtaggcccaggccccatgaggcaccagtggaagcacagctccaagttcagacaggtgcccttagagaggaaaaccatgacaggcaaatgcatttcctctggagtttgagaccctgacaaacaacaggtggcatctggtgtgctgttcttgagttttcgtttaggattagttgagttccagctgggttttgggagaaaggagatgctaccaagtcttggatgttagggcgagaccctgcaagttgagtattagagagcttgtctttcaaggcaggttcctggggcttcagggctaggagggaggagcctgcccttttaacagaaccccagtcacatgcggctcaagtcactcagaggctgttgcatttcagggctatgttggtcctttgtttacctcctaaaccacagctgtttgtgtttcacatatgttgtgaattttccttggttctttttaaaggaatgataataaagttacttgctttaggatttgcttgtttttcttccacttcagaagcttctgagagggaatgggatgatcctaccagttgccttttcagacctgaggctcta

SEQ ID NO: 52 - protein, 346 aa, Homo sapiens
MVEKEEAGGGISEEEAAQYDRQIRLWGLEAQKRLRASRVLLVGLKGLGAEIAKNLILAGVKGLTMLDHEQVTPEDPGAQFLIRTGSVGRNRAEASLERAQNLNPMVDVKVDTEDIEKKPESFFTQFDAVCLTCCSRDVIVKVDQICHKNSIKFFTGDVFGYHGYTFANLGEHEFVEEKTKVAKVSQGVEDGPDTKRAKLDSSETTMVKKKVVFCPVKEALEVDWSSEKAKAALKRTTSDYFLLQVLLKFRTDKGRDPSSDTYEEDSELLLQIRNDVLDSLGISPDLLPEDFVRYCFSEMAPVCAVVGGILAQEIVKALSQRDPPHNNFFFFDGMKGNGIVECLGPK

SEQ ID NO: 53 - DNA, 2530 bp, Homo sapiens
cagcttccctgtggtttcccgaggcttccttgcttcccgctctgcgaggagcctttcatccgaaggcgggacgatgccggataatcggcagccgaggaaccggcagccgaggatccgctccgggaacgagcctcgttccgcgcccgccatggaaccggatggtcgcggtgcctgggcccacagtcgcgccgcgctcgaccgcctggagaagctgctgcgctgctcgcgttgtactaacattctgagagagcctgtgtgtttaggaggatgtgagcacatcttctgtagtaattgtgtaagtgactgcattggaactggatgtccagtgtgttacaccccggcctggatacaagacttgaagataaatagacaactggacagcatgattcaactttgtagtaagcttcgaaatttgctacatgacaatgagctgtcagatttgaaagaagataaacctaggaaaagtttgtttaatgatgcaggaaacaagaagaattcaattaaaatgtggtttagccctcgaagtaagaaagtcagatatgttgtgagtaaagcttcagtgcaaacccagcctgcaataaaaaaagatgcaagtgctcagcaagactcatatgaatttgtttccccaagtcctcctgcagatgtttctgagagggctaaaaaggcttctgcaagatctggaaaaaagcaaaaaaagaaaactttagctgaaatcaaccaaaaatggaatttagaggcagaaaaagaagatggtgaatttgactccaaagaggaatctaagcaaaagctggtatccttctgtagccaaccatctgttatctccagtcctcagataaatggtgaaatagacttactagcaagtggctccttgacagaatctgaatgttttggaagtttaactgaagtctctttaccattggctgagcaaatagagtctccagacactaagagcaggaatgaagtagtgactcctgagaaggtctgcaaaaattatcttacatctaagaaatctttgccattagaaaataatggaaaacgtggccatcacaatagactttccagtcccatttctaagagatgtagaaccagcattctgagcaccagtggagattttgttaagcaaaccgtgccctcagaaaatataccattgcctgaatgttcttcaccaccttcatgcaaacgtaaagttggtggtacatcagggaggaaaaacagtaacatgtccgatgaattcattagtctttcaccaggtacaccaccttctacattaagtagttcaagttacaggcaagtgatgtctagtccctcagcaatgaagctgttgcccaatatggctgtgaaaagaaatcatagaggagagactttgctccatattgcttctattaagggcgacataccttctgttgaataccttttacaaaatggaagtgatccaaatgttaaagaccatgctggatggacaccattgcatgaagcttgcaatcatgggcacctgaaggtagtggaattattgctccagcataaggcattggtgaacaccaccgggtatcaaaatgactcaccacttcacgatgcagccaagaatgggcacgtggatatagtcaagctgttactttcctatggagcctccagaaatgctgttaatatatttggtctgcggcctgtcgattatacagatgatgaaagtatgaaatcgctattgctgctaccagagaagaatgaatcatcctcagctagccactgctcagtaatgaacactgggcagcgtagggatggacctcttgtacttataggcagtgggctgtcttcagaacaacagaaaatgctcagtgagcttgcagtaattcttaaggctaaaaaatatactgagtttgacagtacagtaactcatgttgttgttcctggtgatgcagttcaaagtaccttgaagtgtatgcttgggattctcaatggatgctggattctaaaatttgaatgggtaaaagcatgtctacgaagaaaagtatgtgaacaggaagaaaagtatgaaattcctgaaggtccacgcagaagcaggctcaacagagaacagctgttgccaaagctgtttgatggatgctacttctatttgtggggaaccttcaaacaccatccaaaggacaaccttattaagctcgtcactgcaggtgggggccagatcctcagtagaaagcccaagccagacagtgacgtgactcagaccatcaatacagtcgcataccatgcgagacccgattctgatcagcgcttctgcacacagtatatcatctatgaagatttgtgtaattatcacccagagagggttcggcagggcaaagtctggaaggctccttcgagctggtttatagactgtgtgatgtcctttgagttgcttcctcttgacagctgaatattataccagatgaacatttcaaattgaatttgcacggtttgtgagagcccagtcattgtactgtttttaatgttcacatttttacaaataggtagagtcattcatatttgtctttgaatc

SEQ ID NO: 54 - protein, 777 aa, Homo sapiens
MPDNRQPRNRQPRIRSGNEPRSAPAMEPDGRGAWAHSRAALDRLEKLLRCSRCTNILREPVCLGGCEHIFCSNCVSDCIGTGCPVCYTPAWIQDLKINRQLDSMIQLCSKLRNLLHDNELSDLKEDKPRKSLFNDAGNKKNSIKMWFSPRSKKVRYVVSKASVQTQPAIKKDASAQQDSYEFVSPSPPADVSERAKKASARSGKKQKKKTLAEINQKWNLEAEKEDGEFDSKEESKQKLVSFCSQPSVISSPQINGEIDLLASGSLTESECFGSLTEVSLPLAEQIESPDTKSRNEVVTPEKVCKNYLTSKKSLPLENNGKRGHHNRLSSPISKRCRTSILSTSGDFVKQTVPSENIPLPECSSPPSCKRKVGGTSGRKNSNMSDEFISLSPGTPPSTLSSSSYRQVMSSPSAMKLLPNMAVKRNHRGETLLHIASIKGDIPSVEYLLQNGSDPNVKDHAGWTPLHEACNHGHLKVVELLLQHKALVNTTGYQNDSPLHDAAKNGHVDIVKLLLSYGASRNAVNIFGLRPVDYTDDESMKSLLLLPEKNESSSASHCSVMNTGQRRDGPLVLIGSGLSSEQQKMLSELAVILKAKKYTEFDSTVTHVVVPGDAVQSTLKCMLGILNGCWILKFEWVKACLRRKVCEQEEKYEIPEGPRRSRLNREQLLPKLFDGCYFYLWGTFKHHPKDNLIKLVTAGGGQILSRKPKPDSDVTQTINTVAYHARPDSDQRFCTQYIIYEDLCNYHPERVRQGKVWKAPSSWFIDCVMSFELLPLDS

SEQ ID NO: 55 - DNA, 3678 bp, Homo sapiens
ggcacgagggccagtttctgcagtggaggtcgcgactgagggacgggacagagaagtcgcgaaagtgggccagaggttctgcgacaccacctcgggtgagctgcgccaggcccgggatagggactgttgtgttcgaatgcccgccccggtcggccgccgctccccgcctagtccacggagctcaatggcggcagtcgcgctgagggactcggctcagggtatgacctttgaggatgtggccatttatttctcccaagaagagtgggagctccttgatgagtctcagaggttcctgtactgcgatgtgatgctggagaactttgcacatgtaacatccctgggttattgccatggaatggagaatgaggcgatagcttctgagcagagtgtatctatacaggtcaggacttctaagggcaatacacccacccagaaaactcacctcagtgagattaagatgtgtgtcccagtcttgaaagacattttgcctgcggctgagcaccaaaccacatcccctgtgcaaaagtcatacttgggtagcacaagcatgagaggcttctgcttcagtgctgaccttcaccagcatcaaaagcattacaatgaagaagagccctggaaaaggaaggtggatgaggctacatttgtgaccggctgcagattccatgtgttgaattatttcacctgtggggaggccttcccagcccccacggacctactccaacacgaagccactcccagtggtgaggagccacacagtagcagcagcaagcatatacaggcatttttcaatgcaaaaagttattacaagtggggtgaatacagaaaagcttcaagccacaaacacacacttgttcagcatcagagtgtctgttctgaaggagggctttatgagtgtagcaaatgtgagaaagccttcacttgcaagaacacacttgttcagcaccagcaaattcacactggacaaaagatgtttgagtgtagtgaatgtgaggaatcctttagcaaaaagtgccacctaatcttacacaagataattcacactggagaaaggccttatgaatgcagtgatcgtgagaaagcctttatccataaatctgaattcattcaccaccagagacgtcacactggaggagtgcgtcatgagtgtggtgaatgtaggaaaacctttagctacaaatctaacctcattgaacaccagagagttcacactggagaaaggccttatgaatgtggcgagtgcgggaaatcctttagacaaagctctagcctttttcgacaccagagagttcactctggagaaaggccttatcagtgctgtgagtgtgggaaatcctttagacaaatcttcaatctcattcgacatagaagagttcacactggagaaatgccttatcagtgcagtgattgtgggaaatcttttagctgcaaatcggaactcattcaacaccagagaattcacagtggagaaagaccttatgaatgcagagaatgtgggaaatcctttagacaattctctaacctcattcgacaccgcagcattcacactggtgataggccttatgagtgcagtgaatgtgagaaatcctttagccgcaaatttatcctgattcaacaccaaagagttcacactggagaaagaccttatgaatgcagtgaatgtggaaaatcctttacccgcaaatctgacctcattcaacaccggagaattcatactggcacaagaccttatgagtgcagtgaatgtggcaaatcttttagacagcgctctggcctcattcagcaccggagacttcatactggagaaaggccttatgaatgtagtgaatgtggaaagtcttttagccaaagtgctagcctcattcaacaccagagagttcacactggagaaaggccttatgaatgtagtgaatgtgggaaatcctttagccagagctctagcctcattcaacaccagagaggtcacactggagaaagaccttatgagtgcagtcaatgtgggaaaccctttacccacaaatcagaccttattcagcaccaaagagttcacactggagaaaggccttatgaatgcagtgaatgtgggaaatcctttagccgcaaatctaacctcattcgacatcggagagttcacactgaagaaaggccttaaatgtgaagggaatgtgctatttctttattcagtataatagcactggaggagactgtggtagccatcttcgtaaatttaaactttgagcacccacagtggggtattcttcataagtttcaggtatgtgggaagctctgaggaggttcattgtaatttctaatctgccgaggcctatagcctgatttatgtcactgccaatttctgaggctgaagccatttcacatttcacccctaccacctggcaggtgcacaccatgtgcatgagtcacttccccacagtgctcagagaagcaaacctctgtactctcccatttgcttggggaaattattaatagcccaagcatgtagggtcttcatgtcttttctctgactttagagtatacacctgacccagttgtggtccagagaatctgagttgtgctgtcagctttctaaggattacctttttaaggaacattgtcggtctcacatgatgcttgtaatgaatttttccacattctgattcaccagcctggaaactgcttggtgcacattgctttaatttataatgtttttataaaggttttaaaaaaatttacgcacctttaatcttgggtgttctattcattgcatagaatgacttgtaagcagaatagtgatgtcagcatgaaggggtgaatagattttgtggagatctcaaactttctgtactcagaagggacaatgtgatggcagaagacagctctttgttctgtattgctctaattggcctgctgcccaaggcctcaaagtaaagactgccaggctttgtgttcctgtattgtggcctggtgccatttttgtcaggtcagaggtcaccatgaaaaggaggcagttgtgacaatccccagtgcttctgtgaacgtgaattttgttcagttgtccacaggagatccacataattcctagcactggtgaggggaatctgttgcccaggtcctgcaaaggagccatgtgccatggcatataagtcagtgtagactggtgccatttgttgtcagactataggtgtggaggtgaaattacaggttcaacagtaattgggacagaaactccaggtaaatggggagtggagaagactgcagtaaattagatggaatgactcttctaaaagttcatctacaaattttccagtgaatatggttgtgtaggatcagtgcatacagaaattctcaggatcttctgtttactatcgctgagatcattatcagaaaatagtctggccgggcatggtgtaatcctaacactttgggaggccaaggcgggcggattgcctgagctcaggagttcaagaccagcctgggcaacatggtgaaatcccatgtctactaaaatacaaaaaattagccaggcgtggcagcatgcgcctatagtcccagccacttgggaggctgaggcaggagaatcgcttgaacccagaaggcggaagttgcagtgagctgagattgcaccactgcactccagcccaggcaacagagtgagactccgtctccaaaaaaaaaaaaaaaaaa

SEQ ID NO: 56 - protein, 654 aa, Homo sapiens
MAAVALRDSAQGMTFEDVAIYFSQEEWELLDESQRFLYCDVMLENFAHVTSLGYCHGMENEAIASEQSVSIQVRTSKGNTPTQKTHLSEIKMCVPVLKDILPAAEHQTTSPVQKSYLGSTSMRGFCFSADLHQHQKHYNEEEPWKRKVDEATFVTGCRFHVLNYFTCGEAFPAPTDLLQHEATPSGEEPHSSSSKHIQAFFNAKSYYKWGEYRKASSHKHTLVQHQSVCSEGGLYECSKCEKAFTCKNTLVQHQQIHTGQKMFECSECEESFSKKCHLILHKIIHTGERPYECSDREKAFIHKSEFIHHQRRHTGGVRHECGECRKTFSYKSNLIEHQRVHTGERPYECGECGKSFRQSSSLFRHQRVHSGERPYQCCECGKSFRQIFNLIRHRRVHTGEMPYQCSDCGKSFSCKSELIQHQRIHSGERPYECRECGKSFRQFSNLIRHRSIHTGDRPYECSECEKSFSRKFILIQHQRVHTGERPYECSECGKSFTRKSDLIQHRRIHTGTRPYECSECGKSFRQRSGLIQHRRLHTGERPYECSECGKSFSQSASLIQHQRVHTGERPYECSECGKSFSQSSSLIQHQRGHTGERPYECSQCGKPFTHKSDLIQHQRVHTGERPYECSECGKSFSRKSNLIRHRRVHTEERP

SEQ ID NO: 57 - DNA, 2704 bp, Homo sapiens
acatccgggtaccgactccagcccgcctagacgctggcactatggtcatggcggaggggacggcagtgctgaggcggaacaggccgggcaccaaggcgcaggatttctataattggcctgatgaatcctttgatgaaatggacagtacactagctgttcaacagtatattcaacagaacataagagcagattgctccaatattgacaaaattcttgaaccacctgaaggccaagatgaaggtgtgtggaagtatgaacatttaaggcagttctgccttgagctaaatggacttgctgtcaaacttcagggtgaatgccatccagatacttgcactcaaatgacagcaactgaacaatggatttttctttgtgcagctcataaaactccaaaagagtgtcctgctatagactatactagacacacacttgatggtgctgcatgtcttctgaatagcaataaatattttcccagcagggttagcataaaggaatcatctgtagcgaaactaggatcagtatgccgtaggatttacagaatattttcacatgcttattctcatcatcggcagatatttgatgaatatgaaaatgaaacatttttgtgtcatcggtttactaagtttgtgatgaaatacaatttgatgtccaaggataacctgattgtaccaattttagaagaggaagtacagaattcagtttctggggaaagtgaagcatgaagggaatcataggaaaaatgtactgatcatataattaacattatgtactgtatatatcattttagacacatcaatcatgtatccatattatagcttctttgtttagtataggtttttgtatgctgggtttgccttttaaaatgggaaatactttttaagttattcataagctgtatattcaccagtgtggcactcatggtttttaaataagattagtattatctgtttataatgcctgttaataaaagaatttacagtttggtaaaattgctgctaaacaatcattggatcacaatcctcatcagacaaacccatctgtaaaaaaaatgagggagagcttgaggtttcacacaagccatttactaaagaggtagaaatgttttctattggttttaccttgagtttagatatcctaaaaaattctgtagtacgtagttttgtcttacctgttaactttccccaattgagataaaagtgttttaaaattctgtttatagtttttgatatgcatatataattatgtgtatatctaaatacaaatgcaaatgaagcattagtaatacttaaataattttactgtgctacataaagtataacatacttggaaaggatttaccgttctgcaacaacggactggtacatacaggatgatcacaatggtaaggcacataaattattttcccactggaaacctgccctgtccaccccttctcatttcccttaacctatcttcaaactactttagctgagaagcttttcaccagactgagttagtggtggcttatacctatttagatttgtattaattgcttacagattatacctcatattagcaattacattacactacaagaaaatgtatttgcataggctcttgcttatctttgttttgcaaaattgttctacttagaaaacagtccttaaaatagtttgactcttcctgttagtaatatattaatctttcatttaaccagctaggcagcattaaatagaattgaagaaataccatagtatttattttacaccccctctcccacgaagtttatgtttggattacatgcacgtgtgagattatttgcaataattcataggttccaagggtgttgatgaatagtcatacatttttttggactttgttataattcattgtggtaagaatgattgaaatgcagatttaacaatcttataatctattgaatgccatttttgataaagcactggaggtcttattgccaaactgattgtaatgaggcagtaagggtgaaaacattgtacatgttgtgaagaaagtatttaaatccaacttttgaacagatttaacaaacatgaggaacttttttatttagaaggataattttgaagatgaaaatgtattcatcttaattgttttttcaaatttaagggaataatttataccatcttttcagacaagaatgtacagcaaaaataaggggaacagtagtatactgagagtgtgtgtatgtatagtgtatgcctttccaagcttgccagtctttttggctttgaacactgcccatcagctacagtcattactgttccccaacccacaactatcttttaagaagtcttagttcacagtgaaaggaatgatgactttgaaattatggatttatattaatggcactataaaccaatggtaatggtaatttttaaacttgctaaatattgagaaactaaactactaagttaataaattatatatagcagtgtagctgttctctctagatggtgtctcacaatggattcctgttgcttgactattttcttagtgaatatttatactaaggtagtgactgagatttggtgatctggctgagtattttgaaacacattttgaataatatggcttagtgttaacggggacttaaatatgatttttttttcttactcatttcaccttccctgtactgtatgtttggaattgatcataaaacatctccaaaagaaaaaaaaaaaaaaaaaaa

SEQ ID NO: 58 - protein, 225 aa, Homo sapiens [sequence omitted]

SEQ ID NO: 59 - DNA, 2312 bp, Homo sapiens
tccagtgacggagccgcccggccgacagccccgagacgacagcccggcgcgtcccggtccccacctccgaccaccgccagcgctccaggccccgcgctccccgctcgccgccaccgcgccctccgctccgcccgcagtgccaaccatgaccgccgccagtatgggccccgtccgcgtcgccttcgtggtcctcctcgccctctgcagccggccggccgtcggccagaactgcagcgggccgtgccggtgcccggacgagccggcgccgcgctgcccggcgggcgtgagcctcgtgctggacggctgcggctgctgccgcgtctgcgccaagcagctgggcgagctgtgcaccgagcgcgacccctgcgacccgcacaagggcctcttctgtgacttcggctccccggccaaccgcaagatcggcgtgtgcaccgccaaagatggtgctccctgcatcttcggtggtacggtgtaccgcagcggagagtccttccagagcagctgcaagtaccagtgcacgtgcctggacggggcggtgggctgcatgcccctgtgcagcatggacgttcgtctgcccagccctgactgccccttcccgaggagggtcaagctgcccgggaaatgctgcgaggagtgggtgtgtgacgagcccaaggaccaaaccgtggttgggcctgccctcgcggcttaccgactggaagacacgtttggcccagacccaactatgattagagccaactgcctggtccagaccacagagtggagcgcctgttccaagacctgtgggatgggcatctccacccgggttaccaatgacaacgcctcctgcaggctagagaagcagagccgcctgtgcatggtcaggccttgcgaagctgacctggaagagaacattaagaagggcaaaaagtgcatccgtactcccaaaatctccaagcctatcaagtttgagctttctggctgcaccagcatgaagacataccgagctaaattctgtggagtatgtaccgacggccgatgctgcaccccccacagaaccaccaccctgccggtggagttcaagtgccctgacggcgaggtcatgaagaagaacatgatgttcatcaagacctgtgcctgccattacaactgtcccggagacaatgacatctttgaatcgctgtactacaggaagatgtacggagacatggcatgaagccagagagtgagagacattaactcattagactggaacttgaactgattcacatctcatttttccgtaaaaatgatttcagtagcacaagttatttaaatctgtttttctaactgggggaaaagattcccacccaattcaaaacattgtgccatgtcaaacaaatagtctatcttccccagacactggtttgaagaatgttaagacttgacagtggaactacattagtacacagcaccagaatgtatattaaggtgtggctttaggagcagtgggagggtaccagcagaaaggttagtatcatcagatagctcttatacgagtaatatgcctgctatttgaagtgtaattgagaaggaaaattttagcgtgctcactgacctgcctgtagccccagtgacagctaggatgtgcattctccagccatcaagagactgagtcaagttgttccttaagtcagaacagcagactcagctctgacattctgattcgaatgacactgttcaggaatcggaatcctgtcgattagactggacagcttgtggcaagtgaatttcctgtaacaagccagattttttaaaatttatattgtaaatattgtgtgtgtgtgtgtgtgtgtatatatatatatatatgtacagttatctaagttaatttaaagttgtttgtgcctttttatttttgtttttaatgctttgatatttcaatgttagcctcaatttctgaacaccataggtagaatgtaaagcttgtctgatcgttcaaagcatgaaatggatacttatatggaaattctctcagatagaatgacagtccgtcaaaacagattgtttgcaaaggggaggcatcagtgtccttggcaggctgatttctaggtaggaaatgtggtagctcacgctcacttttaatgaacaaatggcctttattaaaaactgagtgactctatatagctgatcagttttttcacctggaagcatttgtttctactttgatatgactgtttttcggacagtttatttgttgagagtgtgaccaaaagttacatgtttgcacctttctagttgaaaataaagtatattttttctaaaaaaaaaaaaaaacgacagcaacggaattc

SEQ ID NO: 60 - protein, 349 aa, Homo sapiens
MTAASMGPVRVAFVVLLALCSRPAVGQNCSGPCRCPDEPAPRCPAGVSLVLDGCGCCRVCAKQLGELCTERDPCDPHKGLFCDFGSPANRKIGVCTAKDGAPCIFGGTVYRSGESFQSSCKYQCTCLDGAVGCMPLCSMDVRLPSPDCPFPRRVKLPGKCCEEWVCDEPKDQTVVGPALAAYRLEDTFGPDPTMIRANCLVQTTEWSACSKTCGMGISTRVTNDNASCRLEKQSRLCMVRPCEADLEENIKKGKKCIRTPKISKPIKFELSGCTSMKTYRAKFCGVCTDGRCCTPHRTTTLPVEFKCPDGEVMKKNMMFIKTCACHYNCPGDNDIFESLYYRKMYGDMA

SEQ ID NO: 61 - DNA, 4289 bp, Homo sapiens
gatcaatactgaggccgcgtcgacccccttgagccgagacccccccccagcccagcccccaccccaccccccgcacacgccccaccccccccacgacccagcctcataccgcaccagctgaggcacccaagaggattaccccctggggccctctcccgccccccaaaaaagagaagatcccctctcctggcccatcccttcccttcttccctcccccctccccccgaactttccctctcgcatgcttttcccctgcaccacggatcgcctctcggatgccgcttgcctggaagctgcgttaggagcgagcggcggcggtggcggcggtggcggcggcggcggcagctcgggagtgctatgaccggcaaactcgccgagaagctgccggtgaccatgagcagtttgctaaaccaactgcctgacaatctgtaccccgaggagatccccagcgcgctcaacctcttctccggcagcagcgactcggtagtccattacaatcagatggctacagagaatgtaatggacatcggtctgaccaacgagaagcccaacccggaactctcttactccggctccttccagccagcccccgggaacaagaccgtgacctacttgggaaagttcgccttcgactccccttccaactggtgccaggacaacatcattagcctcatgagcgccggcatcttgggggtgcccccggcttcaggggcgctaagcacgcagacgtccacggccagcatggtgcagccaccgcagggtgacgtggaggccatgtatcccgcgctacccccctactccaactgcggcgacctctactcagagcccgtgtctttccacgacccccagggcaatcccgggctcgcctattccccccaggattaccaatcggccaagccggcgttggacagcaatctcttccccatgattcctgactacaacctctaccaccaccccaacgacatgggctccattccggagcacaagcccttccagggcatggaccccatccgggtcaacccgccccctactacccctctggagaccatcaaggcattcaaagacaagcagatccacccgggctttggcagcctgccccagccgccgctcaccctcaagcccatccggccccgcaagtaccccaaccggcctagcaagacaccgctccacgaacggccccacgcgtgcccggccgagggctgcgaccgccgtttcagccgttcggacgagctgacccggcacctgcgcatccacacgggccacaagcccttccagtgccggatctgcatgcggagcttcagccgcagcgaccacctcaccactcacatccgcactcatacgggcgagaagccctttgcctgcgagttctgcgggcgcaagtttgcgcgcagcgacgagcgcaagcgccacgccaagatccacctcaagcaaaaggagaagaaggcggagaagggcggtgcaccctctgcatcctcggcgccccccgtgtcgctggcccccgtggtcaccacctgcgcctgaggatcgggcccccagatccccacttttcccctccagtgcctcccggctgctagcctgaaagcagcgggaaagccagccacggaggcgtaggggccgcgccctggcctctccatggacgtgcggccccttgcttccccttcgatgcccccggttcccaacctttcacgccggccagcggtcaggggccagggctggaggcgccttcccctcgcggtcccccacttagccaaggcgtgggggcggaaaggtggcgtctagcccgctttgttcagttcggatcgccttgatccaggggccgccgggccgcgccaaggacctgcaagggactgaaggcggagcccatccaaccctcgcccgacccaaacacctcattgtttcccccacgtctccctctataccccctcgaagactcgagagggggagggggtaaggagcgcaccaaagcgcagagcttgctgcccgccgcacgcacgcgcgcctgcgtgcggggatgcgcgcgagtgtgtgcgtgctcgcgtgtgtgtgtatgtgtgtgtgtgagtgtgtgtgtgtgcgcgcgcgcaagcgtgtgtgtttaagactcttgagctgaactgggctgtgtttaccccaaactcttccccacctcgggtccccaagccgctgggagatgtcccatgctgggggtccgcacgtggctggaggaggtggtcttccatccgctctgaaatcatgtttcttagagaaatgcctcggatgccgccgacgcggtgctgctgccgccgcttcgggtttggcccctcagaacccctccttttctgagcgcttccctcttaggcctcagggcagtttgatctgtggggagaaagagcagccatcgctgagcctgccttttaaaatatatgtgtatttccttagccccactctaagaaatctatgttcctgagtttgccccctgccctcccactccttccccttttcccctctaaaccttctcccatctctttcaaaatcttttcccagaaaggcaggcttcaaccagccactccagctttgtgtcttctctcaattacatagcaatttctccttcccaccatcatggggaagctggctctgcttttgccctttgtcatcaccaacacaacagatagaatttaaatataagtatatggtgtgcgtgtgtatgtatgtgtatgtatatgcatgcatgtgtataaagatgcacatgcgtacatatacataacatacacacaatatgtattcctagcaaaataaaatctctaaggtacttggttatccagtgcagtgcaccggaataaagagaatttgtaggcgtatacagctttaaatgatttattttttatgaaaatgttaactgatgagattatatctacatacgtgtgttatgtgtgtggatatagatgcacacatatctgtacatatacatgtgagtgtacatatatacacatatacacatctatgtatggatatgtgtgtatacacatatacacatctctgtccaaaatttcctcaaagatatggggattttttcatgaatccatgtggatgaatgaggtgtctcctttccatacccagtctcaccttctccccaccctacctcacctcttctcaggcacccctcttccccagctgtcctgccagcccttctcgtacagggtggctcctttgaagtggagtaatagggaaggttgctctctgccacagcttgcagcatggtcttgactgaatgtactgttcctgttagcgttacttctcctgtggtcagtaagttgcccagagagaaggaacaaaggtctggagtttacagaatgtctgtttttaaagtcactttatgcgttttccacttttttcttttttaagaaaaagaagtaccatttttgttttgttttgttttgatttttggtggtggataaataatactaaaaggactctagtggaaaggggggatatcgaagagcagggggttgtgaatttccaggtacttggactttttgtagaagtagagagaagaagatgaagtttgccaggagggcccatattttttcagctgaagggtaaaatctttctttgcagagacagtattttgctgaatactttttataatgtgatgattattaaaaaagcaaaaattttggtcacttccaagctagaaggaggaatcagataccctttaatattttttcctcgctccttctggtatatgcatgtcactgcatgataattgagttttcctttgttttaataaaactgttctcagacattaagctaaactaagagaaaaataactttgttgccaaaaggttgtgctatccagattttttatatgtctgcatgtttaaaaaaaaaaaagcaacaaaagaaaatgcactctaacttatgtgaactgagagaaaaaaatcaggttttaaacaggaaaacctatggggaatgatattttttgaaagacttttgtataaagttgagtacttagaaaaaagacaaaccagatgtaatatattttgtggatgtttttatttcttggatttatagtaccttatactaaggttaaaaaaatatgcttgatattgtgaaaaggtgaaattcttcaccaacatttcatttgctcctttgtcatattgtaatgccaatataatatagttaatgaaaacagcatttttaaaaaccgaaatattgaaatggtgtaatgttgtaccatttgcactgtgagcaaatgctaatacagtaaatatattgtgtttgctgacaatcaaaaaaaaaaaaaaaaaaaa

SEQ ID NO: 62 - protein, 387 aa, Homo sapiens [sequence omitted]

SEQ ID NO: 63 - DNA, 4977 bp, Homo sapiens
caagataccctccaggccctcatcaccttttttcaagtcaagatttcatcccatacatgcatgactcaatcagatttggaaatgtggatatgccctgtcgtccaagcccaatatagcccttcccctccaggttccagttatgcggtcgtcagacatacagctcggaatacaccacggagatcatgaaccccgactacaccaagctgaccatggaccttggcagcactgagatcacggctacagccaccacgtccctgcccagcatcagtacctttgtggagggctactcgagcaactacgaactcaagccttcctgcgtgtaccaaatgcagcggcccttgatcaaagtggaggaggggcgggcgcccagctaccatcaccatcaccaccaccaccaccaccaccaccaccatcaccagcagcagcatcagcagccatccattcctccagcctccagcccggaggacgaggtgctgcccagcacctccatgtacttcaagcagtccccaccgtccacccccaccacgccggccttccccccgcaggcgggggcgttatgggacgaggcactgccctcggcgcccggctgcatcgcacccggcccgctgctggacccgccgatgaaggcggtccccacggtggccggcgcgcgcttcccgctcttccacttcaagccctcgccgccgcatccccccgcgcccagcccggccggcggccaccacctcggctacgacccgacggccgctgccgcgctcagcctgccgctgggagccgcagccgccgcgggcagccaggccgccgcgcttgagggccacccgtacgggctgccgctggccaagagggcggccccgctggccttcccgcctctcggcctcacgccctcccctaccgcgtccagcctgctgggcgagagtcccagcctgccgtcgccgcccagcaggagctcgtcgtctggcgagggcacgtgtgccgtgtgcggggacaacgccgcctgccagcactacggcgtgcgaacctgcgagggctgcaagggctttttcaagagaacagtgcagaaaaatgcaaaatatgtttgcctggcaaataaaaactgcccagtagacaagagacgtcgaaaccgatgtcagtactgtcgatttcagaagtgtctcagtgttggaatggtaaaagaagttgtccgtacagatagtctgaaagggaggagaggtcgtctgccttccaaaccaaagagcccattacaacaggaaccttctcagccctctccaccttctcctccaatctgcatgatgaatgctcttgtccgagctttaacagactcaacacccagagatcttgattattccagatactgtcccactgaccaggctgctgcaggcacagatgctgagcatgtgcaacaattctacaacctcctgacagcctccattgatgtatccagaagctgggcagaaaagattccgggatttactgatctccccaaagaagatcagacattacttattgaatcagcctttttggagctgtttgtcctcagactttccatcaggtcaaacactgctgaagataagtttgtgttctgcaatggacttgtcctgcatcgacttcagtgccttcgtggatttggggagtggctcgactctattaaagacttttccttaaatttgcagagcctgaaccttgatatccaagccttagcctgcctgtcagcactgagcatgatcacagaaagacatgggttaaaagaaccaaagagagtcgaagagctatgcaacaagatcacaagcagtttaaaagaccaccagagtaagggacaggctctggagcccaccgagtccaaggtcctgggtgccctggtagaactgaggaagatctgcaccctgggcctccagcgcatcttctacctgaagctggaagacttggtgtctccaccttccatcattgacaagctcttcctggacaccctacctttctaatcaggagcagtggagcagtgagctgcctcctctcctagcacctgcttgctacgcagcaaagggataggtttggaaacctatcatttcctgtccttccttaagaggaaaagcagctcctgtagaaagcaaagactttcttttttttctggctcttttccttacaacctaaagccagaaaacttgcagagtattgtgttggggttgtgttttatatttaggcattgggggatggggtgggagggggttatagttcatgagggttttctaagaaattgctaacaaagcacttttggacaatgctatcccagcaggaaaaaaaaggataatataactgttttaaaactctttctggggaatccaattatagttgctttgtatttaaaaacaagaacagccaagggttgttcgccagggtaggatgtgtcttaaagattggtcccttgaaaatatgcttcctgtatcaaaggtacgtatgtggtgcaaacaaggcagaaacttccttttaatttccttcttcctttattttaacaaatggtgaaagatggaggattacctacaatcagacatggcaaaacaatatggctgtttgcttcataacagctgcaatttttaaagtgctgtcttactaagtcttgttatactctcttatctatatgccggaaataaaaaggaggcagtcatgttagcaaatgacacgttaatatccctagcagaggctgtgttcaccttccctgtcgatcccttctgaggtatggcccatccaagacttttaggccattcttgatggaaccagatccctgccctgactgtccagctatcctgaaagtggatcagattataaactggattacatgtaactgttttggttgtgttctatcaaccccaccagagttccctaaacttgcttcagttatagtaactgactggtatatcattcagaagcgccataagtcagttgagtattgatcctagataagaacatgcaatcagaggactggtcatacagggtaagcaccagggacaataaggatttttatagatataatttaatttttgttattggttaaggagacaattttggagagcaagcaaatcttctttttaaaaaatagtatgaatgtgaatactagaaaagatttaagaaatagtatgagtgtgagtcataggaaggattagtgggctgcgtttcaacattccgtgttcgtactcccttttgtatgtttctactgttaatgccatattactatgagataatttgttgcatagtgtccttatttgtataaacatttgtatgcacgttatattgtaatagctttgcctgtatttattgcaagaccaccagctcctggaagctgagttacagagtaattaaatggggtgttcacagtgacttggatacaccaattagaaattaaataagcaaatatatatatatatatataaatatagcaggttacatatatatatttataatgtgtctttttattaaccatttgtacaataaatgtcacttcccatgccgttattttatggttcatttgcagtgacttttaaggcagtactgtttagcactttgatattaaaattttgcttatgttttgctaaattcgaataatgtttgaagatttttaggtctaaaagtctttatattatatacgctgtatcaagtcaaaatatctttggccattttgctaagaaacaaactttgaatgtcaaactgatgtcacagtagtttttgttagctttaaatcatttttgctttagtctttttaaaggaaaataacaaaactatgctgtttatattgcattaattatacaatcaaacaaatgccaaatgaattgcctaattgcgcaagataacccagataggaaatcatatgtttttttccaagagtcattctaatatttgattatgttatgtgtgcttttatgaaagattgttatttttatatatcaagatgatagaacctggaatgttaggattttgaaatgttagacttggaaggggcctggtctgtcaactagtccaaccccttaaaattcatagaggacgaaactggggcccaattgaagggtgaagagttactcaaggtcaaacagctggtaacagaatcaagactaagacctaatttacctttccatactctttttttttctcaacttcatctatataaaatcaggcttttaaacataaccactaatatttacctgaagataaccatgagtaaagtatacttttgcattaattttttgagtatatgcaaacataataaatattattaaatatcaaggaaagctaacatttcatacaagatagcttcagaccaaattcaaattgaatttgaataaattagaaatactgtgcatacataaccttcttgtgcaccatgagtatttggaaagttaatccttgtttttgtcgtgtctatagagaacaaacaaataaaaacagagccctagagaaatggcgttactttttatttttacacccatcagatttaaggaaaagactttttagccattataatctagtggttggaaggaatgaagaagcttttttagtaataggtccagatatgagtgctaaaaataaagatgatagcatgttcttctgtcttccatagttattacaactatgagagcctcccaagtcatcttatcaactcaacccccttttttttgtcttaatgttgcacataagtttatacagagtggatgaccacactagcacagaagagaacaacatgtattaaagcaggtgattcctcccttggcgggagagctctctcagtgtgaacatgccttctgtgggcggaaatcaggaagccaccagctgttaatggagagtgccttgcttttatttcagacagcagagttttccaaagtttctctgctcctctaacagcattgctctttagtgtgtgttaacctgtggtttgaaagaaatgctcttgtacattaacaatgtaaatttaaatgattaaattacattttatcaatggca

SEQ ID NO: 64 - protein, 587 aa, Homo sapiens
MDLGSTEITATATTSLPSISTFVEGYSSNYELKPSCVYQMQRPLIKVEEGRAPSYHHHHHHHHHHHHHHQQQHQQPSIPPASSPEDEVLPSTSMYFKQSPPSTPTTPAFPPQAGALWDEALPSAPGCIAPGPLLDPPMKAVPTVAGARFPLFHFKPSPPHPPAPSPAGGHHLGYDPTAAAALSLPLGAAAAAGSQAAALEGHPYGLPLAKRAAPLAFPPLGLTPSPTASSLLGESPSLPSPPSRSSSSGEGTCAVCGDNAACQHYGVRTCEGCKGFFKRTVQKNAKYVCLANKNCPVDKRRRNRCQYCRFQKCLSVGMVKEVVRTDSLKGRRGRLPSKPKSPLQQEPSQPSPPSPPICMMNALVRALTDSTPRDLDYSRYCPTDQAAAGTDAEHVQQFYNLLTASIDVSRSWAEKIPGFTDLPKEDQTLLIESAFLELFVLRLSIRSNTAEDKFVFCNGLVLHRLQCLRGFGEWLDSIKDFSLNLQSLNLDIQALACLSALSMITERHGLKEPKRVEELCNKITSSLKDHQSKGQALEPTESKVLGALVELRKICTLGLQRIFYLKLEDLVSPPSIIDKLFLDTLPF

SEQ ID NO: 65 - DNA, 3536 bp, Homo sapiens; identical to SEQ ID NO: 17

SEQ ID NO: 66 - protein, 706 aa, Homo sapiens
MASPADSCIQFTRHASDVLLNLNRLRSRDILTDVVIVVSREQFRAHKTVLMACSGLFYSIFTDQLKCNLSVINLDPEINPEGFCILLDFMYTSRLNLREGNIMAVMATAMYLQMEHVVDTCRKFIKASEAEMVSAIKPPREEFLNSRMLMPQDIMAYRGREVVENNLPLRSAPGCESRAFAPSLYSGLSTPPASYSMYSHLPVSSLLFSDEEFRDVRMPVANPFPKERALPCDSARPVPGEYSRPTLEVSPNVCHSNIYSPKETIPEEARSDMHYSVAEGLKPAAPSARNAPYFPCDKASKEEERPSSEDEIALHFEPPNAPLNRKGLVSPQSPQKSDCQPNSPTESCSSKNACILQASGSPPAKSPTDPKACNWKKYKFIVLNSLNQNAKPEGPEQAELGRLSPRAYTAPPACQPPMEPENLDLQSPTKLSASGEDSTIPQASRLNNIVNRSMTGSPRSSSESHSPLYMHPPKCTSCGSQSPQHAEMCLHTAGPTFPEEMGETQSEYSDSSCENGAFFCNECDCRFSEEASLKRHTLQTHSDKPYKCDRCQASFRYKGNLASHKTVHTGEKPYRCNICGAQFNRPANLKTHTRIHSGEKPYKCETCGARFVQVAHLRAHVLIHTGEKPYPCEICGTRFRHLQTLKSHLRIHTGEKPYHCEKCNLHFRHKSQLRLHLRQKHGAITNTKVQYRVSATDLPPELPKAC

SEQ ID NO: 67 - DNA, 1922 bp, Homo sapiens
gcccctttctttctcctcgtcggcccgagagcaggaacacgataacgaaggaggcccaacttcattcaataaggagcctgacggatttatcccagacggtagaacaaaaggaagaatattgatggattttaaaccagagtttttaaagagcttgagaatacggggaaattaatttgttctcctacacacatagatagggtaaggttgtttctgatgcagctgagaaaaatgcagaccgtcaaaaaggagcaggcgtctcttgatgccagtagcaatgtggacaagatgatggtccttaattctgctttaacggaagtgtcagaagactccacaacaggtgaggacgtgcttctcagtgaaggaagtgtggggaagaacaaatcttctgcatgtcggaggaaacgggaattcattcctgatgaaaagaaagatgctatgtattgggaaaaaaggcggaaaaataatgaagctgccaaaagatctcgtgagaagcgtcgactgaatgacctggttttagagaacaaactaattgcactgggagaagaaaacgccactttaaaagctgagctgctttcactaaaattaaagtttggtttaattagctccacagcatatgctcaagagattcagaaactcagtaattctacagctgtgtactttcaagattaccagacttccaaatccaatgtgagttcatttgtggacgagcacgaaccctcgatggtgtcaagtagttgtatttctgtcattaaacactctccacaaagctcgctgtccgatgtttcagaagtgtcctcagtagaacacacgcaggagagctctgtgcagggaagctgcagaagtcctgaaaacaagttccagattatcaagcaagagccgatggaattagagagctacacaagggagccaagagatgaccgaggctcttacacagcgtccatctatcaaaactatatggggaattctttctctgggtactcacactctcccccactactgcaagtcaaccgatcctccagcaactccccgggaacgtcggaaactgatgatggtgtggtaggaaagtcatctgatggagaagacgagcaacaggtccccaagggccccatccattctccagttgaactcaagcatgtgcatgcaactgtggttaaagttccagaagtgaattcctctgccttgccacacaagctccggatcaaagccaaagccatgcagatcaaagtagaagcctttgataatgaatttgaggccacgcaaaaactttcctcacctattgacatgacatctaaaagacatttcgaactcgaaaagcatagtgccccaagtatggtacattcttctcttactcctttctcagtgcaagtgactaacattcaagattggtctctcaaatcggagcactggcatcaaaaagaactgagtggcaaaactcagaatagtttcaaaactggagttgttgaaatgaaagacagtggctacaaagtttctgacccagagaacttgtatttgaagcaggggatagcaaacttatctgcagaggttgtctcactcaagagacttatagccacacaaccaatctctgcttcagactctgggtaaattactactgagtaagagctgggcatttagaaagatgtcatttgcaatagagcagtccattttgtattatgctgaattttcactggacctgtgatgtcatttcactgtgatgtgcacatgttgtctgtttggtgtctttttgtgcacagattatgatgaagattagattgtgttatcactctgcctgtgtatagtcagatagtccatgcgaaggctgtatatattgaacattatttttgttgttctattataaagtgtgtaagttaccagtttcaataaaggattggtgacaaacacagaaaaaaaaaaaaaaaaaaaaa

SEQ ID NO: 68 - protein, 462 aa, Homo sapiens
MQLRKMQTVKKEQASLDASSNVDKMMVLNSALTEVSEDSTTGEDVLLSEGSVGKNKSSACRRKREFIPDEKKDAMYWEKRRKNNEAAKRSREKRRLNDLVLENKLIALGEENATLKAELLSLKLKFGLISSTAYAQEIQKLSNSTAVYFQDYQTSKSNVSSFVDEHEPSMVSSSCISVIKHSPQSSLSDVSEVSSVEHTQESSVQGSCRSPENKFQIIKQEPMELESYTREPRDDRGSYTASIYQNYMGNSFSGYSHSPPLLQVNRSSSNSPGTSETDDGVVGKSSDGEDEQQVPKGPIHSPVELKHVHATVVKVPEVNSSALPHKLRIKAKAMQIKVEAFDNEFEATQKLSSPIDMTSKRHFELEKHSAPSMVHSSLTPFSVQVTNIQDWSLKSEHWHQKELSGKTQNSFKTGVVEMKDSGYKVSDPENLYLKQGIANLSAEVVSLKRLIATQPISASDSG

SEQ ID NO: 69 - DNA, 2761 bp, Homo sapiens
agaggacgcccggtgaaggggctccagcctggcagtttctgcgtgttagcatttctagaatagagtgggtgggaactgacccaagtaaagtcccagagactcgaacactgacgcacaggaaagcctcaagtgggaggagaaatgcaaatcccctactgatgatggcgtcagcggctttctcctagggactgtgaggggcgcttctgactttggacttgagcactgcctgggacctgtgctgagagagcgctagcatgtctcagtggaatcaagtccaacagttagaaatcaagtttttggagcaggtggatcaattctatgatgacaactttcccatggaaattcggcatctgttggcccaatggattgaaaatcaagactgggaggcagcttctaacaatgaaaccatggcaacgattcttcttcaaaacttgttaatacaactggatgaacagttaggtcgtgtttccaaagagaaaaacctactcttgatacacaatctaaaaagaattaggaaggtccttcagggaaaatttcatggaaatccaatgcatgtagctgtggttatttcaaactgtttaagggaagagaggagaatattggctgcagccaacatgcctgtccaggggcctctagagaaatccttacaaagttcttcagtttcagaaagacagaggaatgtggagcacaaagtggctgccattaaaaacagtgtgcagatgacagaacaagataccaaatacttagaagatctgcaagacgaatttgactacaggtataaaacaattcagacaatggatcagagtgacaagaatagtgccatggtgaatcaggaagttttgacactgcaggaaatgcttaacagcctcgatttcaagagaaaggaggctctcagtaaaatgacccaaatcatccatgagacagacctgttaatgaacaccatgctcatagaagagctgcaagactggaagcggcggcagcaaatcgcctgcatcgggggtccactccacaatgggctcgaccagcttcagaactgctttacactattggcagaaagtcttttccaactgagaaggcaattggagaaactagaggagcaatctaccaaaatgacatatgaaggtgatcccattccaatgcaaagaactcacatgctagaaagagtcaccttcttgatctacaaccttttcaagaactcatttgtggttgagcgacagccatgtatgccaacccaccctcagaggccgttggtacttaaaaccctaattcagttcactgtaaaactaaggctactaataaaattgccagaactaaactatcaggtaaaggttaaggcatcaattgacaagaatgtttcaactctaagcaaccgaagatttgtactttgtggaactaatgtcaaagccatgtctattgaagaatcttccaatgggagtctctcagtagaatttcgacatttgcaaccaaaggaaatgaagtccagtgctggaggtaaaggaaatgagggctgtcacatggtgactgaagaacttcattccataacgtttgaaacacagatctgcctctatggcctgaccatagatttggagaccagctcattgcctgtggtgatgatttccaatgtcagtcagttacctaatgcttgggcatccatcatttggtacaacgtgtcaaccaacgattcccagaacttggttttctttaataatcctccacctgccacattgagtcaactactggaggtgatgagctggcagttttcatcgtacgttggtcgtggtcttaactcagatcaactccatatgctggcagagaagcttacagtccaatctagctacagtgatggtcacctcacctgggccaagttctgcaaggaacatttacctggtaaatcatttaccttttggacatggcttgaagcaatattggatctaattaagaaacacattcttcccctttggattgatgggtatgtcatgggctttgttagcaaagagaaggaacggctgttgctaaaggataaaatgcctggcacctttttattaagattcagtgaaagccatctcggaggaataactttcacctgggtggaccattctgaaagtggggaagtgagattccactctgtagaaccctacaataaaggccggttgtctgctctgccattcgctgacatcctgcgagactacaaagttattatggctgaaaacattcctgaaaaccctctgaagtacctatatcctgacattcccaaagacaaagccttcggtaaacactacagctctcagccttgcgaagtttcaagaccaacagaaaggggtgacaaaggttatgttccttctgtttttatccccatctcaacaatccgaagtgattcaacagagccacattctccatcagaccttcttcccatgtctccaagtgtgtatgcggtgttgagagaaaacctgagtcccacaacaattgaaactgcaatgaagtctccttattctgctgaatgacaggataaactctgacgcaccaagaaaggaagcaaatgaaaaagtttaaagactgttctttgcccaataaccacattttatttcttcagctttgtaaataccaggttctaggaaatgtttgacatctgaagctctcttcacactcccgtggcactcctcaattgggagtgttgtgactgaaatgcttgaaaccaaagcttcagataaacttgcaagataagacaactttaagaaaccagtgttaataacaatattaacag

SEQ ID NO: 70 - protein, 748 aa, Homo sapiens
MSQWNQVQQLEIKFLEQVDQFYDDNFPMEIRHLLAQWIENQDWEAASNNETMATILLQNLLIQLDEQLGRVSKEKNLLLIHNLKRIRKVLQGKFHGNPMHVAVVISNCLREERRILAAANMPVQGPLEKSLQSSSVSERQRNVEHKVAAIKNSVQMTEQDTKYLEDLQDEFDYRYKTIQTMDQSDKNSAMVNQEVLTLQEMLNSLDFKRKEALSKMTQIIHETDLLMNTMLIEELQDWKRRQQIACIGGPLHNGLDQLQNCFTLLAESLFQLRRQLEKLEEQSTKMTYEGDPIPMQRTHMLERVTFLIYNLFKNSFVVERQPCMPTHPQRPLVLKTLIQFTVKLRLLIKLPELNYQVKVKASIDKNVSTLSNRRFVLCGTNVKAMSIEESSNGSLSVEFRHLQPKEMKSSAGGKGNEGCHMVTEELHSITFETQICLYGLTIDLETSSLPVVMISNVSQLPNAWASIIWYNVSTNDSQNLVFFNNPPPATLSQLLEVMSWQFSSYVGRGLNSDQLHMLAEKLTVQSSYSDGHLTWAKFCKEHLPGKSFTFWTWLEAILDLIKKHILPLWIDGYVMGFVSKEKERLLLKDKMPGTFLLRFSESHLGGITFTWVDHSESGEVRFHSVEPYNKGRLSALPFADILRDYKVIMAENIPENPLKYLYPDIPKDKAFGKHYSSQPCEVSRPTERGDKGYVPSVFIPISTIRSDSTEPHSPSDLLPMSPSVYAVLRENLSPTTIETAMKSPYSAE

SEQ ID NO: 71 - DNA, 2439 bp, Homo sapiens
gcagccgccaccgccgccgccgccgccaccagagccgccctgtccgcgccgcgcctcggcagccggaacagggccgccgtcggggagccccaacacacggtccacagctcatcatgatggacttggagctgccgccgccgggactcccgtcccagcaggacatggatttgattgacatactttggaggcaagatatagatcttggagtaagtcgagaagtatttgacttcagtcagcgacggaaagagtatgagctggaaaaacagaaaaaacttgaaaaggaaagacaagaacaactccaaaaggagcaagagaaagcctttttcgctcagttacaactagatgaagagacaggtgaatttctcccaattcagccagcccagcacatccagtcagaaaccagtggatctgccaactactcccaggttgcccacattcccaaatcagatgctttgtactttgatgactgcatgcagcttttggcgcagacattcccgtttgtagatgacaatgaggtttcttcggctacgtttcagtcacttgttcctgatattcccggtcacatcgagagcccagtcttcattgctactaatcaggctcagtcacctgaaacttctgttgctcaggtagcccctgttgatttagacggtatgcaacaggacattgagcaagtttgggaggagctattatccattcctgagttacagtgtcttaatattgaaaatgacaagctggttgagactaccatggttccaagtccagaagccaaactgacagaagttgacaattatcatttttactcatctataccctcaatggaaaaagaagtaggtaactgtagtccacattttcttaatgcttttgaggattccttcagcagcatcctctccacagaagaccccaaccagttgacagtgaactcattaaattcagatgccacagtcaacacagattttggtgatgaattttattctgctttcatagctgagcccagtatcagcaacagcatgccctcacctgctactttaagccattcactctctgaacttctaaatgggcccattgatgtttctgatctatcactttgcaaagctttcaaccaaaaccaccctgaaagcacagcagaattcaatgattctgactccggcatttcactaaacacaagtcccagtgtggcatcaccagaacactcagtggaatcttccagctatggagacacactacttggcctcagtgattctgaagtggaagagctagatagtgcccctggaagtgtcaaacagaatggtcctaaaacaccagtacattcttctggggatatggtacaacccttgtcaccatctcaggggcagagcactcacgtgcatgatgcccaatgtgagaacacaccagagaaagaattgcctgtaagtcctggtcatcggaaaaccccattcacaaaagacaaacattcaagccgcttggaggctcatctcacaagagatgaacttagggcaaaagctctccatatcccattccctgtagaaaaaatcattaacctccctgttgttgacttcaacgaaatgatgtccaaagagcagttcaatgaagctcaacttgcattaattcgggatatacgtaggaggggtaagaataaagtggctgctcagaattgcagaaaaagaaaactggaaaatatagtagaactagagcaagatttagatcatttgaaagatgaaaaagaaaaattgctcaaagaaaaaggagaaaatgacaaaagccttcacctactgaaaaaacaactcagcaccttatatctcgaagttttcagcatgctacgtgatgaagatggaaaaccttattctcctagtgaatactccctgcagcaaacaagagatggcaatgttttccttgttcccaaaagtaagaagccagatgttaagaaaaactagatttaggaggatttgaccttttctgagctagtttttttgtactattatactaaaagctcctactgtgatgtgaaatgctcatactttataagtaattctatgcaaaatcatagccaaaactagtatagaaaataatacgaaactttaaaaagcattggagtgtcagtatgttgaatcagtagtttcactttaactgtaaacaatttcttaggacaccatttgggctagtttctgtgtaagtgtaaatactacaaaaacttatttatactgttcttatgtcatttgttatattcatagatttatatgatgatatgacatctggctaaaaagaaattattgcaaaactaaccactatgtacttttttataaatactgtatggacaaaaaatggcattttttatattaaattgtttagctctggcaaaaaaaaaaaattttaagagctggtactaataaaggattattatgactgttaaaaaaaaaaaaaaaaaaaaaaaaaaaaaaaaaa

SEQ ID NO: 72 - protein, 605 aa, Homo sapiens
MMDLELPPPGLPSQQDMDLIDILWRQDIDLGVSREVFDFSQRRKEYELEKQKKLEKERQEQLQKEQEKAFFAQLQLDEETGEFLPIQPAQHIQSETSGSANYSQVAHIPKSDALYFDDCMQLLAQTFPFVDDNEVSSATFQSLVPDIPGHIESPVFIATNQAQSPETSVAQVAPVDLDGMQQDIEQVWEELLSIPELQCLNIENDKLVETTMVPSPEAKLTEVDNYHFYSSIPSMEKEVGNCSPHFLNAFEDSFSSILSTEDPNQLTVNSLNSDATVNTDFGDEFYSAFIAEPSISNSMPSPATLSHSLSELLNGPIDVSDLSLCKAFNQNHPESTAEFNDSDSGISLNTSPSVASPEHSVESSSYGDTLLGLSDSEVEELDSAPGSVKQNGPKTPVHSSGDMVQPLSPSQGQSTHVHDAQCENTPEKELPVSPGHRKTPFTKDKHSSRLEAHLTRDELRAKALHIPFPVEKIINLPVVDFNEMMSKEQFNEAQLALIRDIRRRGKNKVAAQNCRKRKLENIVELEQDLDHLKDEKEKLLKEKGENDKSLHLLKKQLSTLYLEVFSMLRDEDGKPYSPSEYSLQQTRDGNVFLVPKSKKPDVKKN

SEQ ID NO: 73 - DNA, 3359 bp, Homo sapiens
ggtacgtgcgctcgcggttctctcgcggaggtcggcggtggcgggagcgggctccggagagcctgagagcacggtggggcggggcgggagaaagtggccgcccggaggacgttggcgtttacgtgtggaagagcggaagagttttgcttttcgtgcgcgccttcgaaaactgcctgccgctgtctgaggagtccacccgaaacctcccctcctccgccggcagccccgcgctgagctcgccgacccaagccagcgtgggcgaggtgggaagtgcgcccgacccgcgcctggagctgcgcccccgagtgcccatggctacaagggtgctgagcatgagcgcccgcctgggacccgtgccccagccgccggcgccgcaggacgagccggtgttcgcgcagctcaagccggtgctgggcgccgcgaatccggcccgcgacgcggcgctcttccccggcgaggagctgaagcacgcgcaccaccgcccgcaggcgcagcccgcgcccgcgcaggccccgcagccggcccagccgcccgccaccggcccgcggctgcctccagaggacctggtccagacaagatgtgaaatggagaagtatctgacacctcagcttcctccagttcctataattccagagcataaaaagtatagacgagacagtgcctcagtcgtagaccagttcttcactgacactgaagggttaccttacagtatcaacatgaacgtcttcctccctgacatcactcacctgagaactggcctctacaaatcccagagaccgtgcgtaacacacatcaagacagaacctgttgccattttcagccaccagagtgaaacgactgcccctcctccggccccgacccaggccctccctgagttcaccagtatattcagctcacaccagaccgcagctccagaggtgaacaatattttcatcaaacaagaacttcctacaccagatcttcatctttctgtccctacccagcagggccacctgtaccagctactgaatacaccggatctagatatgcccagttctacaaatcagacagcagcaatggacactcttaatgtttctatgtcagctgccatggcaggccttaacacacacacctctgctgttccgcagactgcagtgaaacaattccagggcatgcccccttgcacatacacaatgccaagtcagtttcttccacaacaggccacttactttcccccgtcaccaccaagctcagagcctggaagtccagatagacaagcagagatgctccagaatttaaccccacctccatcctatgctgctacaattgcttctaaactggcaattcacaatccaaatttacccaccaccctgccagttaactcacaaaacatccaacctgtcagatacaatagaaggagtaaccccgatttggagaaacgacgcatccactactgcgattaccctggttgcacaaaagtttataccaagtcttctcatttaaaagctcacctgaggactcacactggtgaaaagccatacaagtgtacctgggaaggctgcgactggaggttcgcgcgatcggatgagctgacccgccactaccggaagcacacaggcgccaagcccttccagtgcggggtgtgcaaccgcagcttctcgcgctctgaccacctggccctgcatatgaagaggcaccagaactgagcactgcccgtgtgacccgttccaggtcccctgggctccctcaaatgacagacctaactattcctgtgtaaaaacaacaaaaacaaaaaaaaaacaagaaaaccacaactaaaactggaaatgtatattttgtatatttgagaaaacagggaatacattgtattaataccaaagtgtttggtcattttaagaatctggaatgcttgctgtaatgtatatggctttactcaagcagatctcatctcatctcatgacaggcagccagtctcaacatgggtaaggggtgggggtgaaggggagtgtgtgcagcgtttttacctaggcaccatcatttaatgtgacagtgttcagtaaacaaatcagttggcaggcaccagaagaagaatggattgtatgtcaagattttacttggcattgagtagtttttttcaatagtaggtaattccttagagatacagtatacctggcaattcacaaatagccattgaacaaatgtgtgggtttttaaaaattatatacatatatgagttgcctatatttgctattcaaaattttgtaaatatgcaaatcagctttataggtttattacaagttttttaggattcttttggggaagagtcataattcttttgaaaataaccatgaatacacttacagttaggatttgtggtaaggtacctctcaacattaccaaaatcatttctttagagggaaggaataatcattcaaatgaactttaaaaaagcaaatttcatgcactgattaaaataggattattttaaatacaaaaggcattttatatgaattataaactgaagagcttaaagatagttacaaaatacaaaagttcaacctcttacaataagctaaacgcaatgtcatttttaaaaagaaggacttaggggtcgttttcacatatgacaatgttgcatttatgatgcagttttcaagtaccaaaacgttgaattgatgatgcagttttcatatatcgagatgttcgctcgtgcagtactgttggttaaatgacaatttatgtggattttgcatgtaatacacagtgagacacagtaattttatctaaattacagtgcagtttagttaatctattaatactgactcagtgtctgcctttaaatataaatgatatgttgaaaacttaaggaagcaaatgctacatatatgcaatataaaatagtaatgtgatgctgatgctgttaaccaaagggcagaataaataagcaaaatgccaaaaggggtcttaattgaaatgaaaatttaattttgtttttaaaatattgtttatctttatttattttgtggtaatatagtaagtttttttagaagacaattttcataacttgataaattatagttttgtttgttagaaaagttgctcttaaaagatgtaaatagatgacaaacgatgtaaataattttgtaagaggcttcaaaatgtttatacgtggaaacacacctacatgaaaagcagaaatcggttgctgttttgcttctttttccctcttatttttgtattgtggtcatttcctatgcaaataatggagcaaacagctgtatagttgtagaattttttgagagaatgagatgtttatatattaacgacaattttttttttggaaaataaaaagtgcctaaaagaaaaaaaaaaaaaaaaaa

SEQ ID NO: 74 - protein, 457 aa, Homo sapiens
MATRVLSMSARLGPVPQPPAPQDEPVFAQLKPVLGAANPARDAALFPGEELKHAHHRPQAQPAPAQAPQPAQPPATGPRLPPEDLVQTRCEMEKYLTPQLPPVPIIPEHKKYRRDSASVVDQFFTDTEGLPYSINMNVFLPDITHLRTGLYKSQRPCVTHIKTEPVAIFSHQSETTAPPPAPTQALPEFTSIFSSHQTAAPEVNNIFIKQELPTPDLHLSVPTQQGHLYQLLNTPDLDMPSSTNQTAAMDTLNVSMSAAMAGLNTHTSAVPQTAVKQFQGMPPCTYTMPSQFLPQQATYFPPSPPSSEPGSPDRQAEMLQNLTPPPSYAATIASKLAIHNPNLPTTLPVNSQNIQPVRYNRRSNPDLEKRRIHYCDYPGCTKVYTKSSHLKAHLRTHTGEKPYKCTWEGCDWRFARSDELTRHYRKHTGAKPFQCGVCNRSFSRSDHLALHMKRHQN

SEQ ID NO: 75 - DNA, 2984 bp, Homo sapiens
taactgagcgaggagcaattgattaatagctcggcgaggggactcactgactgttataataacactacaccagcaactcctggcttcccagcagccggaacacagacaggagagagtcagtggcaaatagacatttttcttatttcttaaaaaacagcaacttgtttgctacttttatttctgttgatttttttttcttggtgtgtgtggtggttgtttttaagtgtggagggcaaaaggagataccatcccaggctcagtccaacccctctccaaaacggcttttctgacactccaggtagcgagggagttgggtctccaggttgtgcgaggagcaaatgatgaccgccaaggccgtagacaaaatcccagtaactctcagtggttttgtgcaccagctgtctgacaacatctacccggtggaggacctcgccgccacgtcggtgaccatctttcccaatgccgaactgggaggcccctttgaccagatgaacggagtggccggagatggcatgatcaacattgacatgactggagagaagaggtcgttggatctcccatatcccagcagctttgctcccgtctctgcacctagaaaccagaccttcacttacatgggcaagttctccattgaccctcagtaccctggtgccagctgctacccagaaggcataatcaatattgtgagtgcaggcatcttgcaaggggtcacttccccagcttcaaccacagcctcatccagcgtcacctctgcctcccccaacccactggccacaggacccctgggtgtgtgcaccatgtcccagacccagcctgacctggaccacctgtactctccgccaccgcctcctcctccttattctggctgtgcaggagacctctaccaggacccttctgcgttcctgtcagcagccaccacctccacctcttcctctctggcctacccaccacctccttcctatccatcccccaagccagccacggacccaggtctcttcccaatgatcccagactatcctggattctttccatctcagtgccagagagacctacatggtacagctggcccagaccgtaagccctttccctgcccactggacaccctgcgggtgccccctccactcactccactctctacaatccgtaactttaccctggggggccccagtgctggggtgaccggaccaggggccagtggaggcagcgagggaccccggctgcctggtagcagctcagcagcagcagcagccgccgccgccgccgcctataacccacaccacctgccactgcggcccattctgaggcctcgcaagtaccccaacagacccagcaagacgccggtgcacgagaggccctacccgtgcccagcagaaggctgcgaccggcggttctcccgctctgacgagctgacacggcacatccgaatccacactgggcataagcccttccagtgtcggatctgcatgcgcaacttcagccgcagtgaccacctcaccacccatatccgcacccacaccggtgagaagcccttcgcctgtgactactgtggccgaaagtttgcccggagtgatgagaggaagcgccacaccaagatccacctgagacagaaagagcggaaaagcagtgccccctctgcatcggtgccagccccctctacagcctcctgctctgggggcgtgcagcctgggggtaccctgtgcagcagtaacagcagcagtcttggcggagggccgctcgccccttgctcctctcggacccggacaccttgagatgagactcaggctgatacaccagctcccaaaggtcccggaggccctttgtccactggagctgcacaacaaacactaccaccctttcctgtccctctctccctttgttgggcaaagggctttggtggagctagcactgccccctttccacctagaagcaggttcttcctaaaacttagcccattctagtctctcttaggtgagttgactatcaacccaaggcaaaggggaggctcagaaggaggtggtgtggggatcccctggccaagagggctgaggtctgaccctgctttaaagggttgtttgactaggttttgctaccccacttccccttattttgacccatcacaggtttttgaccctggatgtcagagttgatctaagacgttttctacaataggttgggagatgctgatcccttcaagtggggacagcaaaaagacaagcaaaactgatgtgcactttatggcttgggactgatttgggggacattgtacagtgagtgaagtatagcctttatgccacactctgtggccctaaaatggtgaatcagagcatatctagttgtctcaacccttgaagcaatatgtattatatactcagagaacagaagtgcaatgtgatgggaggaacgtagcaatatctgctccttttcgagttgtttgagaaatgtaggctattttttcagtgtatatccactcagattttgtgtatttttgatgtacccacactgttctctaaattctgaatctttgggaaaaaatgtaaagcatttatgatctcagaggttaacttatttaagggggatgtacatattctctgaaactaggatgcatgcaattgtgttggaagtgtccttggtcgccttgtgtgatgtagacaaatgttacaaggctgcatgtaaatgggttgccttattatggagaaaaaaatcactccctgagtttagtatggctgtatatttatgcctattaatatttggaattttttttagaaagtatatttttgtatgctttgttttgtgacttaaaagtgttacctttgtagtcaaatttcagataagaatgtacataatgttaccggagctgatttgtttggtcattagctcttaatagttgtgaaaaaataaatctattctaacgcaaaaccactaactgaagttcagatataatggatggtttgtgactatagtgtaaataaatacttttcaacaat

SEQ ID NO: 76 - protein, 476 aa, Homo sapiens
MMTAKAVDKIPVTLSGFVHQLSDNIYPVEDLAATSVTIFPNAELGGPFDQMNGVAGDGMINIDMTGEKRSLDLPYPSSFAPVSAPRNQTFTYMGKFSIDPQYPGASCYPEGIINIVSAGILQGVTSPASTTASSSVTSASPNPLATGPLGVCTMSQTQPDLDHLYSPPPPPPPYSGCAGDLYQDPSAFLSAATTSTSSSLAYPPPPSYPSPKPATDPGLFPMIPDYPGFFPSQCQRDLHGTAGPDRKPFPCPLDTLRVPPPLTPLSTIRNFTLGGPSAGVTGPGASGGSEGPRLPGSSSAAAAAAAAAAYNPHHLPLRPILRPRKYPNRPSKTPVHERPYPCPAEGCDRRFSRSDELTRHIRIHTGHKPFQCRICMRNFSRSDHLTTHIRTHTGEKPFACDYCGRKFARSDERKRHTKIHLRQKERKSSAPSASVPAPSTASCSGGVQPGGTLCSSNSSSLGGGPLAPCSSRTRTP

SEQ ID NO: 77 - DNA, 2474 bp, Homo sapiens
ctcagcgcccagccgcttcctgcctggattccacagcttcgcgccgtgtactgtcgccccatccctgcgcgcccagcctgccaagcagcgtgccccggttgcaggcgtcatgcagcgggcgcgacccacgctctgggccgctgcgctgactctgctggtgctgctccgcgggccgccggtggcgcgggctggcgcgagctcggggggcttgggtcccgtggtgcgctgcgagccgtgcgacgcgcgtgcactggcccagtgcgcgcctccgcccgccgtgtgcgcggagctggtgcgcgagccgggctgcggctgctgcctgacgtgcgcactgagcgagggccagccgtgcggcatctacaccgagcgctgtggctccggccttcgctgccagccgtcgcccgacgaggcgcgaccgctgcaggcgctgctggacggccgcgggctctgcgtcaacgctagtgccgtcagccgcctgcgcgcctacctgctgccagcgccgccagctccaggaaatgctagtgagtcggaggaagaccgcagcgccggcagtgtggagagcccgtccgtctccagcacgcaccgggtgtctgatcccaagttccaccccctccattcaaagataatcatcatcaagaaagggcatgctaaagacagccagcgctacaaagttgactacgagtctcagagcacagatacccagaacttctcctccgagtccaagcgggagacagaatatggtccctgccgtagagaaatggaagacacactgaatcacctgaagttcctcaatgtgctgagtcccaggggtgtacacattcccaactgtgacaagaagggattttataagaaaaagcagtgtcgcccttccaaaggcaggaagcggggcttctgctggtgtgtggataagtatgggcagcctctcccaggctacaccaccaaggggaaggaggacgtgcactgctacagcatgcagagcaagtagacgcctgccgcaagttaatgtggagctcaaatatgccttattttgcacaaaagactgccaaggacatgaccagcagctggctacagcctcgatttatatttctgtttgtggtgaactgattttttttaaaccaaagtttagaaagaggtttttgaaatgcctatggtttctttgaatggtaaacttgagcatcttttcactttccagtagtcagcaaagagcagtttgaattttcttgtcgcttcctatcaaaatattcagagactcgagcacagcacccagacttcatgcgcccgtggaatgctcaccacatgttggtcgaagcggccgaccactgactttgtgacttaggcggctgtgttgcctatgtagagaacacgcttcacccccactccccgtacagtgcgcacaggctttatcgagaataggaaaacctttaaaccccggtcatccggacatcccaacgcatgctcctggagctcacagccttctgtggtgtcatttctgaaacaagggcgtggatccctcaaccaagaagaatgtttatgtcttcaagtgacctgtactgcttggggactattggagaaaataaggtggagtcctacttgtttaaaaaatatgtatctaagaatgttctagggcactctgggaacctataaaggcaggtatttcgggccctcctcttcaggaatcttcctgaagacatggcccagtcgaaggcccaggatggcttttgctgcggccccgtggggtaggagggacagagagacgggagagtcagcctccacattcagaggcatcacaagtaatggcacaattcttcggatgactgcagaaaatagtgttttgtagttcaacaactcaagacgaagcttatttctgaggataagctctttaaaggcaaagctttattttcatctctcatcttttgtcctccttagcacaatgtaaaaaagaatagtaatatcagaacaggaaggaggaatggcttgctggggagcccatccaggacactgggagcacatagagattcacccatgtttgttgaacttagagtcattctcatgcttttctttataattcacacatatatgcagagaagatatgttcttgttaacattgtatacaacatagccccaaatatagtaagatctatactagataatcctagatgaaatgttagagatgctatatgatacaactgtggccatgactgaggaaaggagctcacgcccagagactgggctgctctcccggaggccaaacccaagaaggtctggcaaagtcaggctcagggagactctgccctgctgcagacctcggtgtggacacacgctgcatagagctctccttgaaaacagaggggtctcaagacattctgcctacctattagcttttctttatttttttaactttttggggggaaaagtatttttgagaagtttgtcttgcaatgtatttataaatagtaaataaagtttttaccatt

SEQ ID NO: 78 - protein, 291 aa, Homo sapiens
MQRARPTLWAAALTLLVLLRGPPVARAGASSGGLGPVVRCEPCDARALAQCAPPPAVCAELVREPGCGCCLTCALSEGQPCGIYTERCGSGLRCQPSPDEARPLQALLDGRGLCVNASAVSRLRAYLLPAPPAPGNASESEEDRSAGSVESPSVSSTHRVSDPKFHPLHSKIIIIKKGHAKDSQRYKVDYESQSTDTQNFSSESKRETEYGPCRREMEDTLNHLKFLNVLSPRGVHIPNCDKKGFYKKKQCRPSKGRKRGFCWCVDKYGQPLPGYTTKGKEDVHCYSMQSK

SEQ ID NO: 79 - DNA, 2506 bp, Homo sapiens
ggcacgaggcacagcttcgcgccgtgtactgtcgccccatccctgcgcgcccagcctgccaagcagcgtgccccggttgcaggcgtcatgcagcgggcgcgacccacgctctgggccgctgcgctgactctgctggtgctgctccgcgggccgccggtggcgcgggctggcgcgagctcggggggcttgggtcccgtggtgcgctgcgagccgtgcgacgcgcgtgcactggcccagtgcgcgcctccgcccgccgtgtgcgcggagctggtgcgcgagccgggctgcggctgctgcctgacgtgcgcactgagcgagggccagccgtgcggcatctacaccgagcgctgtggctccggccttcgctgccagccgtcgcccgacgaggcgcgaccgctgcaggcgctgctggacggccgcgggctctgcgtcaacgctagtgccgtcagccgcctgcgcgcctacctgctgccagcgccgccagctccaggaaatgctagtgagtcggaggaagaccgcagcgccggcagtgtggagagcccgtccgtctccagcacgcaccgggtgtctgatcccaagttccaccccctccattcaaagataatcatcatcaagaaagggcatgctaaagacagccagcgctacaaagttgactacgagtctcagagcacagatacccagaacttctcctccgagtccaagcgggagacagaatatggtccctgccgtagagaaatggaagacacactgaatcacctgaagttcctcaatgtgctgagtcccaggggtgtacacattcccaactgtgacaagaagggattttataagaaaaagcagtgtcgcccttccaaaggcaggaagcggggcttctgctggtgtgtggataagtatgggcagcctctcccaggctacaccaccaaggggaaggaggacgtgcactgctacagcatgcagagcaagtagacgcctgccgcaaggttaatgtggagctcaaatatgccttattttgcacaaaagactgccaaggacatgaccagcagctggctacagcctcgatttatatttctgtttgtggtgaactgattttttttaaaccaaagtttagaaagaggtttttgaaatgcctatggtttctttgaatggtaaacttgagcatcttttcactttccagtagtcagcaaagagcagtttgaattttcttgtcgcttcctatcaaaatattcagagactcgagcacagcacccagacttcatgcgcccgtggaatgctcaccacatgttggtcgaagcggccgaccactgactttgtgacttaggcggctgtgttgcctatgtagagaacacgcttcacccccactccccgtacagtgcgcacaggctttatcgagaataggaaaacctttaaaccccggtcatccggacatcccaacgcatgctcctggagctcacagccttctgtggtgtcatttctgaaacaagggcgtggatccctcaaccaagaagaatgtttatgtcttcaagtgacctgtactgcttggggactattggagaaaataaggtggagtcctacttgtttaaaaaatatgtatctaagaatgttctagggcactctgggaacctataaaggcaggtatttcgggccctcctcttcaggaatcttcctgaagacatggcccagtcgaaggcccaggatggcttttgctgcggccccgtggggtaggagggacagagagacagggagagtcagcctccacattcagaggcatcacaagtaatgtcacaattcttcggatgactgcagaaaatagtgttttgtagttcaacaactcaagacgaagcttatttctgaggataagctctttaaaggcaaagctttattttcatctctcatcttttgtcctccttagcacaatgtaaaaaagaatagtaatatcagaacaggaaggaggaatggcttgctggggagcccatccaggacactgggagcacatagagattcacccatgtttgttgaacttagagtcattctcatgcttttctttataattcacacatatatgcagagaagatatgttcttgttaacattgtatacaacatagccccaaatatagtaagatctatactagataatcctagatgaaatgttagagatgctatttgatacaactgtggccatgactgaggaaaggagctcacgcccagagactgggctgctctcccggaggccaaacccaagaaggtctggcaaagtcaggctcagggagactctgccctgctgcagacctcggtgtggacacacgctgcatagagctctccttgaaaacagaggggtctcaagacattctgcctacctattagcttttctttatttttttaactttttggggggaaaagtatttttgagaagtttgtcttgcaatgtatttataaatagtaaataaagtttttaccattaaaaaaataaaaaaaaaaaaaaaaaaaaaaaaaaaaaaaaaaaaaaaaaaaa

SEQ ID NO: 80 - protein, 291 aa, Homo sapiens; identical to SEQ ID NO: 78

SEQ ID NO: 81 - DNA, 3165 bp, Homo sapiens
ggtgaaggtgagactcatgagggaatacaaggtagtggtgttagggagtggaggggttggcaaatctgcccttactgtgcagtttgtcactgggactttcattgagaaatatgaccccaccattgaagatttctaccgcaaagagatcgaagtggactcttccccctccgtgctggaaattctggacaccgcaggaactgagcagtttgcctccatgagagatctctacatcaaaaacggccaaggtttcatcctggtttatagcctggttaatcaacagtcttttcaggatatcaagccaatgagagatcaaattgtcagagtgaagagatatgaaaaagtcccactaatcctagtaggaaataaagtggatctggaaccagaaagagaggttatgtcttcagaaggcagagctctggctcaagaatggggctgtcctttcatggagacatcggcaaaaagtaaatcaatggtggatgaactttttgctgagatcgtcaggcaaatgaactattcatccctgccggagaagcaagatcagtgttgtacaacttgtgtcgtccagtaaagaagataacctcaatcatggccataccgagcagataaaactcagaggaaatttgcacagatgctgctttggagaactttacaacctgggttgcagaactgagccttggtaaacctgtctctattacagcatgttgccatacatctatttaagtgcataaggtctttggccttcaagatccatcgaccttaaacaggaatgcttagcacgtttaccatacgtttaaaatccattctttatcaatcagtccttttatagctttctaagttcttattgatggctaatatacaagggttaatttttaatattttaattgatttctttaatcagtttctcgacttgtatttattaaatactcaaactcagtattacctactcaatgccttttaaaagaaagttataatggagaaaaaattgagccttaaacaaatggttacttctgtatattacctcgtaccagtgcttcatcctatttgtaaaatctttctcctttaaaattattggttaatactttgagactttgtttacgtgtggcagtgttgtaaaaagaaactaaagatcacattttacctgtatggatggaatatcccttttcttcaagtgcagtttgtgatgtgttttgtttttttttttttttttttgtaattaacatgttctgaaggttacaattgatatttgaaattgactgtagagcatttagttgaagagttaagcattcagttccattaggttttcacatgtgttaatctcatttacagcattgaattgcggcagtaacattttcctttctgtgaagttctaaatttagttatgacctatttagcaatgcctttgaaaagggatattgtatccatggtaaattaattgtatacctaaacagagatagctcatctttgcctatcaggcttgtaattgacatctagtagacttctgcacatgtaaaattgaattcaaataaaatcatacacactttctagttcttaatatttgtctttctgaataatagtttaaagcaatatttgttaaagttttcttgcactatcacaattgctttttagttatttctcaagaagcatgttcgtattagagacaaaatctgtgtaacaggagggagaatagcgccaagtctctgggctattttttatttttgcaaatgtgctttctaatagccattgccttccatgttgtttacctaatcagcatatttttgtctgaatacttgaacattttaacagtaacgcaggtgtagaatcagaaaggaaacttatgcagagtaatattttggttcagttttaacatcgtgacaatgagggctttttctagcaatgatttttaaattgtgtaagtttgacagtattttattgttgggtttttatttgattttagttgtgtgcttttcatttgcagaagttagtaactgcagctcacctactgcaccaaagttctcgattttaggagcccagctttagtcatttgaacatgcttctaaataaaataaaacaaaaccaaaactatacttttgatctataataagagctcaataactttgtcaaggaaagctctaatatatgcagtgatggtttatgaaagggtgtggcaattttaaatttatattgtgtgtgatgttcaaataaagtggtatctacattcatgtgatttatgggtcagcatgaccattaattactgagtagaaattgactaaactttgatttcctttttttaaatcgtgttgcatttgattcctgagcaaattccctcaaagtgaactcttgttcttaaattttgaattttatggtgagattgtaaagatagaggcaattgaaacattgttccttatttatgaactgcttgaagtgaatacttaatttaagtttgcactttaataccaaacttaaaaccaaacactcatttaaaagtaggttaagtgatcatggatcattgttattagctttgtggctttgtgaaattctaaaggaatcaaataattcatcatgatttaaattttctagagattttgatttttttataatgtttctttcctgtagattgtgttcttgtttctctctctctctctctctctctctctctctctctctctctctctctctctctctcaaaattacagtgttcattgtcattgacctcagcagcaaatttgacttgaattcacttaggatcgcaggaatcaggggaaagtgattttaaaggtggtttctccagcacattttaagaaaagggaccaaaagttattttagcttcctcaatagattgcatgttgcttattaggataataaattaatattaaatgcaatatatgtcttgtctttattatggcatctatttaggagttgttcaaatcactgcagtagggctctgcaaataaaataatgtaacctattatcatggatctaatgtactgtaactttatcagtgaaaggtaaaatctcaaataacaagtacaaacattgaacaattacctataaagatttgtaaaagtaaaatttttccaatagatttcattcttgtcattttgtaagacgaccctgcagtccacctgtttgtaacttttttaataaaatagacatctgtattactga

SEQ ID NO: 82 - protein, 183 aa, Homo sapiens
MREYKVVVLGSGGVGKSALTVQFVTGTFIEKYDPTIEDFYRKEIEVDSSPSVLEILDTAGTEQFASMRDLYIKNGQGFILVYSLVNQQSFQDIKPMRDQIVRVKRYEKVPLILVGNKVDLEPEREVMSSEGRALAQEWGCPFMETSAKSKSMVDELFAEIVRQMNYSSLPEKQDQCCTTCVVQ

SEQ ID NO: 83 - DNA, 2591 bp, Homo sapiens
aaactacaacgaaaaaagacagagctcataatggatgctatccataaacaaaagagcttacaattcaagaaaaccatggatgcaaagaagaactatgagcagaaatgccgggacaaagatgaggcagaacaggccgtcagccggagtgccaacctggtgaacccgaagcaacaagaaaagctttttgtgaaactggcaacttcaaagaccgcagtagaggactcagacaaagcatacatgctgcacatcggcaccctggataaggtccgagaagagtggcagagtgagcacatcaaggcctgcgaggcatttgaggctcaagaatgtgaacgaataaacttcttccggaatgcattgtggttacatgtgaatcagctgtcacaacaatgtgtcaccagtgatgaaatgtacgaacaagtccgaaagagtttagaaatgtgcagcattcagagggacattgaatactttgtgaatcaacgcaaaactggacagattccaccagcacccatcatgcatgagaatttctactcctcccagaagaatgcagtcccagcaggaaaggctacagggcctaacttggcaaggagaggacccctcccaattcctaaaagctcaccagatgatcccaattactctttggttgatgactacagtttgctctatcagtaaaatcaatgaaaccagagctttttccggctagtgcttctgtgatatggaaagggcacccagagcagcaggacctatagccacgttatgtcagcaatgaagactttgaagtgaacccttgctataattttttagagatttaaaatttatggtagacatttaggacaacataagcaagtagagttctgcagttttttgaagtttacaaattgccccattctgaagaattattctttcccagttactcaggttatgaatgaattaggttttcaacatgggaagcatgaaatccacttctggatttggagcatccacttgaggagcagaggtggcagcagaggattctgagccaccaactgcagtagtggctcctttggctttgggcagcctggctgtggagtttccacggcgacacacagcctcagtggtgcaagatttaaaattaccttcctttttggctggaagacttagaagccgcctgatcatactttctcattttacagatgaggaaataaagcctacaagtgtgaaattaatttccttacagttttcctagctgatgagggacagaaccagaactagagcctgagcccaacccacatcactattcttctaacccttcctgaagttgtgatgctcatgctgaaatttaagatgccaaatatttttgccagcactttttcagttgggagaatcaccagggtttaaatgtcagatttatttttatgtggatccctgtgtatgctgaactacagagcatgatgtttaatctaatttaaggagccactgattgtaaaacatgccattattttatgttgcactaagaaggtggggtcgaggagttgccaataaacttgggacagactattgatggccaagcccatctgaatttaagatgctaaagtatgaaaaaaatacatcttagaatcaatgaaataccatattttgattccattcctcaagataattttagagttataaaaccagtcctcaattttgggtcttcacagagaatctttcccttgctagaccccagaattttaaatgcatccgtcttacactttcacaaatatttgggttttcctttttcactcacaaacagcagggaggtcatgtactttttgtacaacacctgtgcactatgagaaaatggtaccttttagttattgacaagttaaaatagcactctcagtttttcagtattacagagagcaaatagtttcctctcctgctctgtgcagtagcttttccagaactatggacaaattgatcagaagaagattgattatttcctcatctttttttcttttttttgaggcagagtctctctctgtcccccaggctgaagtgcagcggcatgatctcagctcactgcaacctctgcctcccgggttcaagtgattctcctgcctcagcctcctgagtagctgggattacaggcacccaccaccacacctggctaattttttgtatttttagtagagacagggttttaccatgttggtcaggctggtctcaaactcctgacctcaggtgatccacctgcctcggcctcccaaagtgctgggattacaggcgtgagccactgcgcccggcctatttccccacctttcgtgtaaggtgctactgaacatgacagcttcttgtcatgacaggaaacttgcatcagttggatatccttttgagaaactgaattttgcaaagggccaaatttccccaaactgaacgggctcaggaaatgttcctttacactcagaacattctattttaagtatattatttattgttggcagttcctcagggatttcccttttctctgtattggtcagtgtagttgatgtaaaaccgttttgtggatggaaaatatttttattttattgctcttttagtttggtaggttaaataaaggttcttggtaatttggg

SEQ ID NO: 84 - protein, 212 aa, Homo sapiens
MDAIHKQKSLQFKKTMDAKKNYEQKCRDKDEAEQAVSRSANLVNPKQQEKLFVKLATSKTAVEDSDKAYMLHIGTLDKVREEWQSEHIKACEAFEAQECERINFFRNALWLHVNQLSQQCVTSDEMYEQVRKSLEMCSIQRDIEYFVNQRKTGQIPPAPIMHENFYSSQKNAVPAGKATGPNLARRGPLPIPKSSPDDPNYSLVDDYSLLYQ

SEQ ID NO: 85 - DNA, 2156 bp, Homo sapiens
agcgcagcactccccgctcgttggcccgggtatcccagcgcggacccacgcgatacgctgacgccccgacgccgatccggccgagccaagtaagggggacggcccgagacggagaagggagagagtgggagtttcccagcccgcagaactttcgaagttgagaagagaacccctggaacgtgcgctcagcactgggattttctggactcaacgatgactctgaataatgtcaccatgcgccagggcactgtgggcatgcagccacagcagcagcgctggagcatcccagctgatggcaggcatctgatggtccagaaagagccccaccagtacagccaccgcaaccgccattctgctacccctgaggaccactgccgccgaagctggtcctctgactccacagactcagtcatctcctctgagtcagggaacacctactaccgagtggtgctcataggggagcagggggtgggcaagtccactctggccaacatctttgcaggtgtgcatgacagcatggacagcgactgcgaggtgctgggagaagatacatatgaacgaaccctgatggttgatggggaaagtgcaacgattatactcctggatatgtgggaaaataagggggaaaatgaatggctccatgaccactgcatgcaggtcggggacgcatacctgattgtctactcaatcacagaccgagcgagcttcgagaaggcatctgagctgcgaatccagctccgcagggcccggcagacagaggacattcccataattttggttggcaacaaaagtgacttagtgcggtgccgagaagtgtctgtatcagaagggagagcctgtgcagtggtgtttgactgcaagttcatcgagacctctgcagctgtccagcacaacgtgaaggagctgtttgagggcattgtgcgacaggtgcgccttcggcgggacagcaaggagaagaatgaacggcggctggcctaccagaaaaggaaggagagcatgcccaggaaagccaggcgcttctggggcaagatcgtggccaaaaacaacaagaatatggccttcaagctcaagtccaaatcctgccatgacctctctgtactctaggaacccagggtcacccagatgtccctttgatggcccttgttgaaggccattgggaccaataatctatattagattgaatacttaagttagatgtggtttcccccattgtagcagggagctagcgtattagccttgtgggcaacatgatgcatgggaaatgaaagatttttgtaaaaagtcagtatttatttccaggaaaagcctgaccttgctatttgaacacccaagactctttagaggatgtgtttggtgttcacatgtgtttcttctattttggatagtagggaagtaaagcttacaaagaatgcctagaacaagaacttttcatcattaaaaatttttcccagtgttctgatatgtgactttgaggccaatgagtcataaacaaatataagaaagctgtcaatgagtttcttcaaaggagggaaaactttctacgaatctaagatccatggagctagaattgtagaactaggctcatcagaatcgtgactattattgctccatcaaactgtgaaaagaaatgatgtggaccttgctggaaacaaaggcttagcaaacaatttttgttcaatgcccaccgagacatatagaattgggaactgatacatgtgtcccttataggctcaaaaattatatcttacaatttcttatttagggggaaattatttgaatcagattctatttagtcaaaccaccttttatgttttattatttttgaattcatggagccatcataaaaatatttttaaaatcagaattattgataccctgtagtgcaaaatgtcaatttttaatgtataatcagaagtctgaattttcataaaacatatagcataaaaacctccagtactttggttgacccttgtatgtcacagctctgctctatttattattattttgcaaaataaccattttaacatttgataaagcatatttatgaacatatttcttaataagaaaaatatccattttattaccattttctatctttttcaaaatatgcaagtttttacctatatgtcttataataaaagaaataaaatatttga

SEQ ID NO: 86 - protein, 296 aa, Homo sapiens
MTLNNVTMRQGTVGMQPQQQRWSIPADGRHLMVQKEPHQYSHRNRHSATPEDHCRRSWSSDSTDSVISSESGNTYYRVVLIGEQGVGKSTLANIFAGVHDSMDSDCEVLGEDTYERTLMVDGESATIILLDMWENKGENEWLHDHCMQVGDAYLIVYSITDRASFEKASELRIQLRRARQTEDIPIILVGNKSDLVRCREVSVSEGRACAVVFDCKFIETSAAVQHNVKELFEGIVRQVRLRRDSKEKNERRLAYQKRKESMPRKARRFWGKIVAKNNKNMAFKLKSKSCHDLSVL

SEQ ID NO: 87 - DNA, 2061 bp, Homo sapiens
tgttccgcgatcttctcaggctctcctagcagcatccatcgccgccaccctatcttcactggcttcaccttctccttctctcttcgttgctgagcgacaagcttcctagcgctatgactgtcgtctccgtcccgcagcgggagccgctcgtcctgggtggccgccttgcgccgcttggcttttcctcccgaggttactttggggccctcccgatggtgaccacggctccgcctcctttaccccggatcccggacccccgggcactgcccccgaccctcttcctccctcatttcctagggggagatggcccgtgtctgaccccccagcctcgcgctccagcagctctgcccaaccgcagcctcgccgtggcgggaggcactcctcgggcagcgccgaagaagcggcgaaagaagaaggtgcgggccagccccgcagggcagctgcccagccgcttccaccagtaccagcagcaccggccgagtctggagggcggccggagccccgcgaccggcccgagcggagcgcaggaggtcccgggcccggccgccgccttggccccgagtcctgcagccgcagccggcacggagggagccagccccgaccttgccccgctgcggcccgcggctcccggccaaacccccctcaggaaagaggttttaaaatcaaagatgggaaaatcggagaaaattgcccttccccatggccagcttgttcatggtatacacttgtatgagcaaccaaagataaacagacagaaaagcaaatataacttgccactaaccaagatcacctctgcaaaaagaaatgaaaacaacttttggcaggattctgtttcatctgacagaattcagaagcaggaaaaaaagccttttaaaaataccgagaacattaaaaattcgcatttgaagaaatcagcatttctaactgaagtgagccaaaaggaaaattatgctggggcaaagtttagtgatccaccttctcctagtgttcttccaaagcctcctagtcactggatgggaagcactgttgaaaattccaaccaaaacagggagctgatggcagtacacttaaaaaccctcctcaaagttcaaacttagatttcagatttcagtatgtgtgtaaaacataatttttcccatatccctggactcttgagaaaattggtacagaaatggaaatttgccttgttgcaacatacaattgcaaaagatgagtttaaaaaattacatacaaacagcttgtattatattttatattttgtaaatactgtataccatgtattatgtgtatattgttcatacttgagaggtatattatagttttgttatgaaagtatgtattttgccctgcccacattgcaggtgttttgtatatatacaatggataaattttaagtgtgtgctaaggcacatggaagaccgattttatttgcacaaggtactgagatttttttcaagaaacagctgtcaaatctcaaggtgaagatctaaatgtgaacagtttactaatgcactactgaagtttaaatctgtggcacaatcaatgtaagcatggggtttgtttctctaaattgatttgtaatctgaaattactgaacaactcctattcccatttttgctaaactcaatttctggttttggtatatatccattccagcttaatgcctctaattttaatgccaacaaaattggttgtaatcaaattttaaaataataataatttggcccccccttttaaaatagtcttgactctttgtgtgtgactgtttctcatgtttgaatgtgtgactaggagatgattttgtgtggttggatttttttgacttctactttactggctgagtgtgagccgccatgcctggccataatctacattttcttaccaggagcagcattgaggtttttgagcatagtacttgactactctagaggctgagacgggagcatctcttgagcctgagaagtggagattgcaattgagctaggatcaggccactgcactccagcctgggtaacagacgctgtctcaaaaaaaaggccaagagaaagtaagggagacaga

SEQ ID NO: 88 - protein, 327 aa, Homo sapiens
MTVVSVPQREPLVLGGRLAPLGFSSRGYFGALPMVTTAPPPLPRIPDPRALPPTLFLPHFLGGDGPCLTPQPRAPAALPNRSLAVAGGTPRAAPKKRRKKKVRASPAGQLPSRFHQYQQHRPSLEGGRSPATGPSGAQEVPGPAAALAPSPAAAAGTEGASPDLAPLRPAAPGQTPLRKEVLKSKMGKSEKIALPHGQLVHGIHLYEQPKINRQKSKYNLPLTKITSAKRNENNFWQDSVSSDRIQKQEKKPFKNTENIKNSHLKKSAFLTEVSQKENYAGAKFSDPPSPSVLPKPPSHWMGSTVENSNQNRELMAVHLKTLLKVQT

SEQ ID NO: 89 - DNA, 2349 bp, Homo sapiens
gctcttatcggttcccatcccagttgttgatcttatgcaagacgctgcacgaccccgcgcccgcttgtcgccacggcacttgaggcagccggagatactctgagttactcggagcccgacgcctgagggtgagatgaacgcgctggcctccctaaccgtccggacctgtgatcgcttctggcagaccgaaccggcgctcctgcccccggggtgacgcgcagcccccagccgcccagacacatggccccaggccaagcaccccatcaggctaccccgtggagggatgcccaccctttcttcctcctgtccccagtgatgggcctcctcagccgcgcctggagccgcctgaggggcctgggacctctagagccctggctggtggaagcagtaaaaggagcagctctggtagaagctggcctggagggagaagctaggactcctctggcaatcccccataccccttggggcagacgccctggagaggaggctgaagacagtggaggccctggagaggacagagaaacactggggctgaaaaccagcagttcccttcctgaagcctggggacttttggatgatgatgatggcatgtatggtgagcgagaggcaaccagtgtccctagagggcagggaagtcaatttgcagatggccagcgtgctcccctgtctcccagccttctgataaggacactgcaaggttctgataagaacccaggggaggagaaagccgaggaagagggagttgctgaagaggagggagttaacaagttctcttatccaccatcacaccgggagtgttgtccagccgtggaggaggaggacgatgaagaagctgtaaagaaagaagctcacagaacctctacttctgccttgtctccaggatccaagcccagcacttgggtgtcttgcccaggggaggaagagaatcaagccacggaggataaaagaacagaaagaagtaaaggagccaggaagacctccgtgtccccccgatcttcaggctccgaccccaggtcctgggagtatcgttcaggagaggcgtccgaggagaaggaggaaaaggcacacgaagaaactgggaaaggagaagctgccccagggccgcaatcctcagccccagcccagaggccccagctcaagtcctggtggtgccaacccagtgatgaagaggagagtgaggtcaagcctttgggggcagctgagaaggatggagaagctgagtgtcctccctgcatccccccaccaagtgccttcctgaaggcctgggtgtattggccaggagaggacacagaggaagaggaagatgaggaagaagatgaggacagtgactctggatcagatgaggaagagggagaagctgaggcttcctcttccactcctgctacaggtgtcttcttgaagtcctgggtctatcagccaggagaggacacagaggaggaggaagatgaggacagtgatacaggatcagccgaggatgaaagagaagctgagacttctgcttccacaccccctgcaagtgctttcttgaaggcctgggtgtatcggccaggagaggacacggaggaggaggaagatgaggatgtggatagtgaggataaggaagatgattcagaagcagccttaggagaagctgagtcagacccacatccctcccacccggaccagagtgcccacttcaggggctggggatatcgacctggaaaagagacagaggaagaggaagctgctgaggactggggagaagctgagccctgccccttccgagtggccatctatgtacctggagagaagccaccgcctccctgggctcctcctaggctgcccctccgactgcaaaggcggctcaagcgcccagaaacccctactcatgatccggaccctgagactcccctaaaggccagaaaggtgcgcttctccgagaaggtcactgtccatttcctggctgtctgggcagggccggcccaggccgcccgccagggcccctgggagcagcttgctcgggatcgcagccgcttcgcacgccgcatcgcccaggcccaggaggagctgagcccctgcctcacccctgctgcccgggccagagcctgggcacgcctcaggaacccacctttagcccccatccctgccctcacccagaccttgccttcctcctctgtcccttcgtccccagtccagaccacgcccttgagccaagctgtggctacaccttcccgctcctctgctgctgcagcggctgccctggacctcagtgggaggcgtggctgagaccaactggtttgcctataatttattaactatttattttttctaagtgtgggtttatataaggaataaagccttttgatttgt

SEQ ID NO: 90 - protein, 674 aa, Homo sapiens
MAPGQAPHQATPWRDAHPFFLLSPVMGLLSRAWSRLRGLGPLEPWLVEAVKGAALVEAGLEGEARTPLAIPHTPWGRRPGEEAEDSGGPGEDRETLGLKTSSSLPEAWGLLDDDDGMYGEREATSVPRGQGSQFADGQRAPLSPSLLIRTLQGSDKNPGEEKAEEEGVAEEEGVNKFSYPPSHRECCPAVEEEDDEEAVKKEAHRTSTSALSPGSKPSTWVSCPGEEENQATEDKRTERSKGARKTSVSPRSSGSDPRSWEYRSGEASEEKEEKAHEETGKGEAAPGPQSSAPAQRPQLKSWWCQPSDEEESEVKPLGAAEKDGEAECPPCIPPPSAFLKAWVYWPGEDTEEEEDEEEDEDSDSGSDEEEGEAEASSSTPATGVFLKSWVYQPGEDTEEEEDEDSDTGSAEDEREAETSASTPPASAFLKAWVYRPGEDTEEEEDEDVDSEDKEDDSEAALGEAESDPHPSHPDQSAHFRGWGYRPGKETEEEEAAEDWGEAEPCPFRVAIYVPGEKPPPPWAPPRLPLRLQRRLKRPETPTHDPDPETPLKARKVRFSEKVTVHFLAVWAGPAQAARQGPWEQLARDRSRFARRIAQAQEELSPCLTPAARARAWARLRNPPLAPIPALTQTLPSSSVPSSPVQTTPLSQAVATPSRSSAAAAAALDLSGRRG

SEQ ID NO: 91 - DNA, 2372 bp, Homo sapiens
gggccgccgtcggcgcgctgggtgcgggaagggggctctggatttcggtccctcccctttttcctctgagtctcggaacgctccagctctcagaccctcttcctcccaggtaaaggccgggagaggagggcgcatctcttttccaggcaccccaccatgggcaatgcctccaatgactcccagtctgaggactgcgagacgcgacagtggcttcccccaggcgaaagcccagccatcagctccgtcatgttctcggccggggtgctggggaacctcatagcactggcgctgctggcgcgccgctggcggggggacgtggggtgcagcgccggccgcaggagctccctctccttgttccacgtgctggtgaccgagctggtgttcaccgacctgctcgggacctgcctcatcagcccagtggtactggcttcgtacgcgcggaaccagaccctggtggcactggcgcccgagagccgcgcgtgcacctacttcgctttcgccatgaccttcttcagcctggccacgatgctcatgctcttcgccatggccctggagcgctacctctcgatcgggcacccctacttctaccagcgccgcgtctcggcctccgggggcctggccgtgctgcctgtcatctatgcagtctccctgctcttctgctcgctgccgctgctggactatgggcagtacgtccagtactgccccgggacctggtgcttcatccggcacgggcggaccgcttacctgcagctgtacgccaccctgctgctgcttctcattgtctcggtgctcgcctgcaacttcagtgtcattctcaacctcatccgcatgcaccgccgaagccggagaagccgctgcggaccttccctgggcagtggccggggcggccccggggcccgcaggagaggggaaagggtgtccatggcggaggagacggaccacctcattctcctggctatcatgaccatcaccttcgccgtctgctccttgcctttcacgatttttgcatatatgaatgaaacctcttcccgaaaggaaaaatgggacctccaagctcttaggtttttatcaattaattcaataattgacccttgggtctttgccatccttaggcctcctgttctgagactaatgcgttcagtcctctgttgtcggatttcattaagaacacaagatgcaacacaaacttcctgttctacacagtcagatgccagtaaacaggctgacctttgaggtcagtagtttaaaagttcttagttatatagcatctggaagatcattttgaaattgttccctggagaaatgaaaacagtgtgtaaacaaaatgaagctgccctaataaaaaggagtatacaaacatttaagctgtggtcaaggctacagatgtgctgacaaggcacttcatgtaaagtgtcagaaggagctacaaaacctaccctcaatgagcatggtacttggcctttggaggaacaatcggctgcattgaagatccagctgcctattgatttaagctttcctgttgaatgacaaagtatgtggttttgtaatttgtttgaaaccccaaacagtgactgtactttctattttaatcttgctactaccgttatacacatatagtgtacagccagaccagattaaacttcatatgtaatctctaggaagtcaatatgtggaagcaaccaagcctgctgtcttgtgatcacttagcgaaccctttatttgaacaatgaagttgaaaatcataggcaccttttactgtgatgtttgtgtatgtgggagtactctcatcactacagtattactcttacaagagtggactcagtgggttaacatcagttttgtttactcatcctccaggaactgcaggtcaagttgtcaggttatttattttataatgtccatatgctaatagtgatcaagaagactttaggaatggttctctcaacaagaaataatagaaatgtctcaaggcagttaattctcattaatactcttattatcctatttctgggggaggatgtacgtggccatgtatgaagccaaatattaggcttaaaaactgaaaaatctggttcattcttcagatatactggaacccttttaaagttgatattggggccatgagtaaaatagattttataagatgactgtgttgtaccaaaattcatctgtctatattttatttaggggaacatggtttgactcatcttatatgggaaaccatgtagcagtgagtcatatcttaatatatttctaaatgtttggcatgtaaatgtaaactcagcatcaaaatatttcagtgaatttgcactgtttaatcatagttactgtgtaaactcatctgaaatgttacaaaaataaactataaaaca

SEQ ID NO: 92 - protein, 358 aa, Homo sapiens
MGNASNDSQSEDCETRQWLPPGESPAISSVMFSAGVLGNLIALALLARRWRGDVGCSAGRRSSLSLFHVLVTELVFTDLLGTCLISPVVLASYARNQTLVALAPESRACTYFAFAMTFFSLATMLMLFAMALERYLSIGHPYFYQRRVSASGGLAVLPVIYAVSLLFCSLPLLDYGQYVQYCPGTWCFIRHGRTAYLQLYATLLLLLIVSVLACNFSVILNLIRMHRRSRRSRCGPSLGSGRGGPGARRRGERVSMAEETDHLILLAIMTITFAVCSLPFTIFAYMNETSSRKEKWDLQALRFLSINSIIDPWVFAILRPPVLRLMRSVLCCRISLRTQDATQTSCSTQSDASKQADL

SEQ ID NO: 93 - DNA, 1630 bp, Homo sapiens
atcgcgggccagaggcggagccgccgccctgccgcgactttcagactccgaccatggcctcgcgctggtggcggtggcggcgcggctgctcctggaagccggcggcgcggagccccgggcccggctcccccggccgtgcgggaccgggccggggccgcgcgccgctgccgatgcccgcgcaggctcataggcagaagggacttgacttgtctcagataccctattttaatcttgtgaagcatttaacacctgcctgtccaaatgtatatagtatatcacagtttcatcacacaaccccgtacagcaaaacacacagtggtgagaaatacaccgatcctttcaaactcggttggagagacttgaaaggtctgtatgagggtattagaaaggaacccctcatatcaacaacagaacttaaggaaatctctgagtactactttgatgtaaaaggaaaagcctttagaccgattattgtggtgctaatggcccgagcatgcaatattcatcataacaactcccgacatgtgcaagccagccagcgcgccatagccttaattgcagaaatgatccacactgctagtctggttcacgatgacgttattgacgatgcaagttctcgaagaggaaaacacacagttaataagatctggggtgaaaagaaggctgttcttgctggagatttaattctttctgcagcatctatagctctggcacgaattggaaatacaactgttatatctattttaacccaagttattgaagatttggtgcgtggtgaatttcttcagctcgggtcaaaagaaaatgagaatgaaagatttgcacactaccttgagaagacattcaagaagaccgccagcctgatagccaacagttgtaaagcagtctctgttctaggatgtcccgacccagtggtgcatgagatcgcctatcagtacggaaaaaatgtaggaatagcttttcagctaatagatgatgtattggacttcacctcgtgttctgaccagatgggcaaaccaacatcagctgatctgaagctcgggttagccactggtcctgtcctgtttgcctgtcagcagttcccagaaatgaatgctatgatcatgcgacggttcagtttgcctggagatgtagacagagctcgacagtatgtactacagagtgatggtgtgcaacaaacaacctacctcgcccagcagtactgccatgaagcaataagagagatcagtaaacttcgaccatccccagaaagagatgccctcattcagctttcagaaattgtactcacaagagataaatgacaactctttctgttctttctggcagctatcttaccagactgtgcctaaagaattttgtggaatacactttgtttgcttcatgtgcagataaccaaaaatcattttaaaagatatcaaacttattgatgggcaatttatttttttttattgcaaaaggtttttcagaaaactttttaaatgtaattaataaaccacctgaatctgtcattctagtcctataaattataatcaaggtatcttgatggttatatgtggtattgtttacactgttaatatccacatgtaaggccattacacaaataaataaccaatgttaaaattcaaaaaaa

SEQ ID NO: 94 - protein, 376 aa, Homo sapiens
MPAQAHRQKGLDLSQIPYFNLVKHLTPACPNVYSISQFHHTTPYSKTHSGEKYTDPFKLGWRDLKGLYEGIRKEPLISTTELKEISEYYFDVKGKAFRPIIVVLMARACNIHHNNSRHVQASQRAIALIAEMIHTASLVHDDVIDDASSRRGKHTVNKIWGEKKAVLAGDLILSAASIALARIGNTTVISILTQVIEDLVRGEFLQLGSKENENERFAHYLEKTFKKTASLIANSCKAVSVLGCPDPVVHEIAYQYGKNVGIAFQLIDDVLDFTSCSDQMGKPTSADLKLGLATGPVLFACQQFPEMNAMIMRRFSLPGDVDRARQYVLQSDGVQQTTYLAQQYCHEAIREISKLRPSPERDALIQLSEIVLTRDK

SEQ ID NO: 95 - DNA, 1702 bp, Homo sapiens
ggagtcgaccgctcgggcagcgcaccgccacgagagcccgggacgcgggaaagaccgaaaggaagaggaagaggcaccggtggccatggggctggaggcggcgcgcgagctggagtgcgcggcgctgggcacgctgctgcgggatccgcgggaggcggaacgcacgctgctgctggactgccgccccttcctggccttctgccggcgccacgtgcgcgccgcgcggccagtgccttggaacgcgctgctgcggcgccgcgcgcgcggccctcctgccgccgttctcgcctgcctgctgcccgaccgcgcgctgcggacgcgcctggtccgcggggagctggcgcgggccgtggtgctggacgagggcagtgcctcggtggcggagctccggcccgacagcccggctcatgtgctgctggccgcgctgctgcacgagacccgcgcggggcccactgccgtgtacttcctgcgaggaggcttcgacggcttccagggctgctgtcccgatctgtgctctgaggcccccgcccctgcgctgccgccaacaggggacaaaaccagccgctccgactccagggctcctgtctacgaccagggtggccctgtggagatcttgccctacctgttcctgggcagctgcagtcactcgtcagacctgcaggggctgcaggcctgtggcatcacagccgtcctcaacgtgtccgccagctgccccaaccactttgagggccttttccgctacaagagtatccctgtggaggacaaccagatggtggagatcagtgcctggttccaggaggccataggcttcattgactgggtgaagaacagcggaggccgggtgctggtgcactgccaggcgggtatctcgcgctctgccaccatctgtctggcatacctcatgcagagtcgccgtgtgcggctggacgaggcctttgacttcgttaagcagcgccggggggtcatctcccccaacttcagtttcatggggcagctgctgcagtttgagacccaggtgctgtgtcactgaggtggtgcccctctgcctgcctgccccactgtgctggcaggagctgactgtggactggtgggctcccctctgggccagcacagtcccctcacctccggcagggctgctacctcctcagagtttcagaagcccccacatgggggctctaggaatgccggcatgctggtctttccgacctggtgctcttctgctgggggactgaggctggccctcattcggggtcgggaaccaagggtgtgtctgctctttccctccccatcctctggcagaaatcagctagacgctataccgtggactctccctggtccaccaccatgttgaagcccttggcagcctgagagctccaaggaacaagctgtgacaaccaggagccctgtctgtgggttcgtctgcccagggcctggagcccaagccctgtgttcctggggaagctggggacttgggaagtgatgggtgtgtcatgttgcgtgtgtctgtctgtgagcctttcacacctgtgctggcgctggaaaattatttgtgctcagctgacatttaacacttcctcccccgcttcctcctagccctgtgggcaggggttggaaacttagcactttatatttatacagaacattcaggatttgtcaataaaatattgttatatttaaaaaaaaaaaaaaaaaaaaaaaaaaa

SEQ ID NO: 96 - protein, 314 aa, Homo sapiens
MGLEAARELECAALGTLLRDPREAERTLLLDCRPFLAFCRRHVRAARPVPWNALLRRRARGPPAAVLACLLPDRALRTRLVRGELARAVVLDEGSASVAELRPDSPAHVLLAALLHETRAGPTAVYFLRGGFDGFQGCCPDLCSEAPAPALPPTGDKTSRSDSRAPVYDQGGPVEILPYLFLGSCSHSSDLQGLQACGITAVLNVSASCPNHFEGLFRYKSIPVEDNQMVEISAWFQEAIGFIDWVKNSGGRVLVHCQAGISRSATICLAYLMQSRRVRLDEAFDFVKQRRGVISPNFSFMGQLLQFETQVLCH

SEQ ID NO: 97 - DNA, 3635 bp, Homo sapiens
tcaacacaggacaatgcaagcccatgagctgttccggtattttcgaatgccagagctggttgacttccgacagtacgtgcgtactcttccgaccaacacgcttatgggcttcggagcttttgcagcactcaccaccttctggtacgccacgagacccaaacccctgaagccgccatgcgacctctccatgcagtcagtggaagtggcgggtagtggtggtgcacgaagatccgcactacttgacagcgacgagcccttggtgtatttctatgatgatgtcacaacattatacgaaggtttccagaggggaatacaggtgtcaaataatggcccttgtttaggctctcggaaaccagaccaaccctatgaatggctttcatataaacaggttgcagaattgtcggagtgcataggctcagcactgatccagaagggcttcaagactgccccagatcagttcattggcatctttgctcaaaatagacctgagtgggtgattattgaacaaggatgctttgcttattcgatggtgatcgttccactttatgatacccttggaaatgaagccatcacgtacatagtcaacaaagctgaactctctctggtttttgttgacaagccagagaaggccaaactcttattagagggtgtagaaaataagttaataccaggccttaaaatcatagttgtcatggatgcctacggcagtgaactggtggaacgaggccagaggtgtggggtggaagtcaccagcatgaaggcgatggaggacctgggaagagccaacagacggaagcccaagcctccagcacctgaagatcttgcagtaatttgtttcacaagtggaactacaggcaaccccaaaggagcaatggtcactcaccgaaacatagtgagcgattgttcagcttttgtgaaagcaacagagaatacagtcaatccttgcccagatgatactttgatatctttcttgcctctcgcccatatgtttgagagagttgtagagtgtgtaatgctgtgtcatggagctaaaatcggatttttccaaggagatatcaggctgctcatggatgacctcaaggtgcttcaacccactgtcttccccgtggttccaagactgctgaaccggatgtttgaccgaattttcggacaagcaaacaccacgctgaagcgatggctcttggactttgcctccaagaggaaagaagcagagcttcgcagcggcatcatcagaaacaacagcctgtgggaccggctgatcttccacaaagtacagtcgagcctgggcggaagagtccggctgatggtgacaggagccgccccggtgtctgccactgtgctgacgttcctcagagcagccctgggctgtcagttttatgaaggatacggacagacagagtgcactgccgggtgctgcctaaccatgcctggagactggaccgcaggccatgttggggccccgatgccgtgcaatttgataaaacttgttgatgtggaagaaatgaattacatggctgccgagggcgagggcgaggtgtgtgtgaaagggccaaatgtatttcagggctacttgaaggacccagcgaaaacagcagaagctttggacaaagacggctggttacacacaggggacattggaaaatggttaccaaatggcaccttgaaaattatcgaccggaaaaagcacatatttaagctggcacaaggagaatacatagcccctgaaaagattgaaaatatctacatgcgaagtgagcctgttgctcaggtgtttgtccacggagaaagcctgcaggcatttctcattgcaattgtggtaccagatgttgagacattatgttcctgggcccaaaagagaggatttgaagggtcgtttgaggaactgtgcagaaataaggatgtcaaaaaagctatcctcgaagatatggtgagacttgggaaggattctggtctgaaaccatttgaacaggtcaaaggcatcacattgcaccctgaattattttctatcgacaatggccttctgactccaacaatgaaggcgaaaaggccagagctgcggaactatttcaggtcgcagatagatgacctctattccactatcaaggtttagtgtgaagaagaaagctcagaggaaatggcacagttccacaatctcttctcctgctgatggccttcatgttgttaattttgaatacagcaagtgtagggaaggaagcgttcgtgtttgacttgtccattcggggttcttctcataggaatgctagaggaaacagaacaccgccttacagtcacctcatgttgcagaccatgtttatggtaatacacactttccaaaatgagccttaaaaattgtaaaggggatactataaatgtgctaagttatttgagacttcctcagtttaaaaagtgggttttaaatcttctgtctccctgcttttctaatcaaggggttaggactttgctatctctgagatgtctgctacttgctgcaaattctgcagctgtctgctgctctaaagagtacagtgcactagagggaagtgttccctttaaaaataagaacaactgtcctggctggagaatctcacaagcggaccagagatctttttaaatccctgctactgtcccttctcacaggcattcacagaacccttctgattcgtaagggttacgaaactcatgttcttctccagtcccctgtggtttctgttggagcataaggtttccagtaagcgggagggcagatccaactcagaaccatgcagataaggagcctctggcaaatgggtgctcatcagaacgcgtggattctctttcatggcagaatgctcttggactcggttctccaggcctgattccccgactccatcctttttcaggggttatttaaaaatctgccttagattctatagtgaagacaagcatttcaagaaagagttacctggatcagccatgctcagctgtgacgcctgaataactgtctactttatcttcactgaaccactcactctgtgtaaaggccaacagatttttaatgtggttttcatatcaaaagatcatgttgggattaacttgcctttttccccaaaaaataaactctcaggcaagcatttctttaaagctattaagggagtatatacttgagtacttattgaaatggacagtaataagcaaatgttcttataatgctacctgatttctatgaaatgtgtttgacaagccaaaattctaggatgtagaaatctggaaagttcatttcctgggattcacttctccagggattttttaaagttaatttgggaaattaacagcagttcactttattgtgagtctttgccacatttgactgaattgagctgtcatttgtacatttaaagcagctgttttggggtctgtgagagtacatgtattatatacaagcacaacagggcttgcactaaagaattgtcattgtaataacactacttggtagcctaacttcatatatgtattcttaattgcacaaaaagtcaataatttgtcaccttggggttttgaatgtttgctttaagtgttggctatttctatgttttataaaccaaaacaaaatttccaaaaacaatgaaggaaaccaaaataaatatttctgcatttcg

SEQ ID NO: 98 - protein, 698 aa, Homo sapiens
MQAHELFRYFRMPELVDFRQYVRTLPTNTLMGFGAFAALTTFWYATRPKPLKPPCDLSMQSVEVAGSGGARRSALLDSDEPLVYFYDDVTTLYEGFQRGIQVSNNGPCLGSRKPDQPYEWLSYKQVAELSECIGSALIQKGFKTAPDQFIGIFAQNRPEWVIIEQGCFAYSMVIVPLYDTLGNEAITYIVNKAELSLVFVDKPEKAKLLLEGVENKLIPGLKIIVVMDAYGSELVERGQRCGVEVTSMKAMEDLGRANRRKPKPPAPEDLAVICFTSGTTGNPKGAMVTHRNIVSDCSAFVKATENTVNPCPDDTLISFLPLAHMFERVVECVMLCHGAKIGFFQGDIRLLMDDLKVLQPTVFPVVPRLLNRMFDRIFGQANTTLKRWLLDFASKRKEAELRSGIIRNNSLWDRLIFHKVQSSLGGRVRLMVTGAAPVSATVLTFLRAALGCQFYEGYGQTECTAGCCLTMPGDWTAGHVGAPMPCNLIKLVDVEEMNYMAAEGEGEVCVKGPNVFQGYLKDPAKTAEALDKDGWLHTGDIGKWLPNGTLKIIDRKKHIFKLAQGEYIAPEKIENIYMRSEPVAQVFVHGESLQAFLIAIVVPDVETLCSWAQKRGFEGSFEELCRNKDVKKAILEDMVRLGKDSGLKPFEQVKGITLHPELFSIDNGLLTPTMKAKRPELRNYFRSQIDDLYSTIKV

SEQ ID NO: 99 - DNA, 3549 bp, Homo sapiens
cccctcttcctcctcctcaagggaaagctgcccacttctagctgccctgccatcccctttaaagggcgacttgctcagcgccaaaccgcggctccagccctctccagcctccggctcagccggctcatcagtcggtccgcgccttgcagctcctccagagggacgcgccccgagatggagagcaaagccctgctcgtgctgactctggccgtgtggctccagagtctgaccgcctcccgcggaggggtggccgccgccgaccaaagaagagattttatcgacatcgaaagtaaatttgccctaaggacccctgaagacacagctgaggacacttgccacctcattcccggagtagcagagtccgtggctacctgtcatttcaatcacagcagcaaaaccttcatggtgatccatggctggacggtaacaggaatgtatgagagttgggtgccaaaacttgtggccgccctgtacaagagagaaccagactccaatgtcattgtggtggactggctgtcacgggctcaggagcattacccagtgtccgcgggctacaccaaactggtgggacaggatgtggcccggtttatcaactggatggaggaggagtttaactaccctctggacaatgtccatctcttgggatacagccttggagcccatgctgctggcattgcaggaagtctgaccaataagaaagtcaacagaattactggcctcgatccagctggacctaactttgagtatgcagaagccccgagtcgtctttctcctgatgatgcagattttgtagacgtcttacacacattcaccagagggtcccctggtcgaagcattggaatccagaaaccagttgggcatgttgacatttacccgaatggaggtacttttcagccaggatgtaacattggagaagctatccgcgtgattgcagagagaggacttggagatgtggaccagctagtgaagtgctcccacgagcgctccattcatctcttcatcgactctctgttgaatgaagaaaatccaagtaaggcctacaggtgcagttccaaggaagcctttgagaaagggctctgcttgagttgtagaaagaaccgctgcaacaatctgggctatgagatcaataaagtcagagccaaaagaagcagcaaaatgtacctgaagactcgttctcagatgccctacaaagtcttccattaccaagtaaagattcatttttctgggactgagagtgaaacccataccaatcaggcctttgagatttctctgtatggcaccgtggccgagagtgagaacatcccattcactctgcctgaagtttccacaaataagacctactccttcctaatttacacagaggtagatattggagaactactcatgttgaagctcaaatggaagagtgattcatactttagctggtcagactggtggagcagtcccggcttcgccattcagaagatcagagtaaaagcaggagagactcagaaaaaggtgatcttctgttctagggagaaagtgtctcatttgcagaaaggaaaggcacctgcggtatttgtgaaatgccatgacaagtctctgaataagaagtcaggctgaaactgggcgaatctacagaacaaagaacggcatgtgaattctgtgaagaatgaagtggaggaagtaacttttacaaaacatacccagtgtttggggtgtttcaaaagtggattttcctgaatattaatcccagccctacccttgttagttattttaggagacagtctcaagcactaaaaagtggctaattcaatttatggggtatagtggccaaatagcacatcctccaacgttaaaagacagtggatcatgaaaagtgctgttttgtcctttgagaaagaaataattgtttgagcgcagagtaaaataaggctccttcatgtggcgtattgggccatagcctataattggttagaacctcctattttaattggaattctggatctttcggactgaggccttctcaaactttactctaagtctccaagaatacagaaaatgcttttccgcggcacgaatcagactcatctacacagcagtatgaatgatgttttagaatgattccctcttgctattggaatgtggtccagacgtcaaccaggaacatgtaacttggagagggacgaagaaagggtctgataaacacagaggttttaaacagtccctaccattggcctgcatcatgacaaagttacaaattcaaggagatataaaatctagatcaattaattcttaataggctttatcgtttattgcttaatccctctctcccccttcttttttgtctcaagattatattataataatgttctctgggtaggtgttgaaaatgagcctgtaatcctcagctgacacataatttgaatggtgcagaaaaaaaaaagataccgtaattttattattagattctccaaatgattttcatcaatttaaaatcattcaatatctgacagttactcttcagttttaggcttaccttggtcatgcttcagttgtacttccagtgcgtctcttttgttcctggctttgacatgaaaagataggtttgagttcaaattttgcattgtgtgagcttctacagattttagacaaggaccgtttttactaagtaaaagggtggagaggttcctggggtggattcctaagcagtgcttgtaaaccatcgcgtgcaatgagccagatggagtaccatgagggttgttatttgttgtttttaacaactaatcaagagtgagtgaacaactatttataaactagatctcctatttttcagaatgctcttctacgtataaatatgaaatgataaagatgtcaaatatctcagaggctatagctgggaacccgactgtgaaagtatgtgatatctgaacacatactagaaagctctgcatgtgtgttgtccttcagcataattcggaagggaaaacagtcgatcaagggatgtattggaacatgtcggagtagaaattgttcctgatgtgccagaacttcgaccctttctctgagagagatgatcgtgcctataaatagtaggaccaatgttgtgattaacatcatcaggcttggaatgaattctctctaaaaataaaatgatgtatgatttgttgttggcatcccctttattaattcattaaatttctggatttgggttgtgacccagggtgcattaacttaaaagattcactaaagcagcacatagcactgggaactctggctccgaaaaactttgttatatatatcaaggatgttctggctttacattttatttattagctgtaaatacatgtgtggatgtgtaaatggagcttgtacatattggaaaggtcattgtggctatctgcatttataaatgtgtggtgctaactgtatgtgtctttatcagtgatggtctcacagagccaactcactcttatgaaatgggctttaacaaaacaagaaagaaacgtacttaactgtgtgaagaaatggaatcagcttttaataaaattgacaacattttattaccac

SEQ ID NO: 100 - protein, 475 aa, Homo sapiens
MESKALLVLTLAVWLQSLTASRGGVAAADQRRDFIDIESKFALRTPEDTAEDTCHLIPGVAESVATCHFNHSSKTFMVIHGWTVTGMYESWVPKLVAALYKREPDSNVIVVDWLSRAQEHYPVSAGYTKLVGQDVARFINWMEEEFNYPLDNVHLLGYSLGAHAAGIAGSLTNKKVNRITGLDPAGPNFEYAEAPSRLSPDDADFVDVLHTFTRGSPGRSIGIQKPVGHVDIYPNGGTFQPGCNIGEAIRVIAERGLGDVDQLVKCSHERSIHLFIDSLLNEENPSKAYRCSSKEAFEKGLCLSCRKNRCNNLGYEINKVRAKRSSKMYLKTRSQMPYKVFHYQVKIHFSGTESETHTNQAFEISLYGTVAESENIPFTLPEVSTNKTYSFLIYTEVDIGELLMLKLKWKSDSYFSWSDWWSSPGFAIQKIRVKAGETQKKVIFCSREKVSHLQKGKAPAVFVKCHDKSLNKKSG

SEQ ID NO: 101 - DNA, 1389 bp, Homo sapiens
atgtctgctgaagtcatccatcaggttgaagaagcacttgatacagatgagaaggagatgctgctctttttgtgccgggatgttgctatagatgtggttccacctaatgtcagggaccttctggatattttacgggaaagaggtaagctgtctgtcggggacttggctgaactgctctacagagtgaggcgatttgacctgctcaaacgtatcttgaagatggacagaaaagctgtggagacccacctgctcaggaaccctcaccttgtttcggactatagagtgctgatggcagagattggtgaggatttggataaatctgatgtgtcctcattaattttcctcatgaaggattacatgggccgaggcaagataagcaaggagaagagtttcttggaccttgtggttgagttggagaaactaaatctggttgccccagatcaactggatttattagaaaaatgcctaaagaacatccacagaatagacctgaagacaaaaatccagaagtacaagcagtctgttcaaggagcagggacaagttacaggaatgttctccaagcagcaatccaaaagagtctcaaggatccttcaaataacttcaggctccataatgggagaagtaaagaacaaagacttaaggaacagcttggcgctcaacaagaaccagtgaagaaatccattcaggaatcagaagcttttttgcctcagagcatacctgaagagagatacaagatgaagagcaagcccctaggaatctgcctgataatcgattgcattggcaatgagacagagcttcttcgagacaccttcacttccctgggctatgaagtccagaaattcttgcatctcagtatgcatggtatatcccagattcttggccaatttgcctgtatgcccgagcaccgagactacgacagctttgtgtgtgtcctggtgagccgaggaggctcccagagtgtgtatggtgtggatcagactcactcagggctccccctgcatcacatcaggaggatgttcatgggagattcatgcccttatctagcagggaagccaaagatgttttttattcagaactatgtggtgtcagagggccagctggaggacagcagcctcttggaggtggatgggccagcgatgaagaatgtggaattcaaggctcagaagcgagggctgtgcacagttcaccgagaagctgacttcttctggagcctgtgtactgcggacatgtccctgctggagcagtctcacagctcaccgtccctgtacctgcagtgcctctcccagaaactgagacaagaaagggggacaattcccggaagtggaattacagagtcaaaggacatgcatttttcaagcctcggatgcatcttactagatgtcctatag

SEQ ID NO: 102 - protein, 462 aa, Homo sapiens
MSAEVIHQVEEALDTDEKEMLLFLCRDVAIDVVPPNVRDLLDILRERGKLSVGDLAELLYRVRRFDLLKRILKMDRKAVETHLLRNPHLVSDYRVLMAEIGEDLDKSDVSSLIFLMKDYMGRGKISKEKSFLDLVVELEKLNLVAPDQLDLLEKCLKNIHRIDLKTKIQKYKQSVQGAGTSYRNVLQAAIQKSLKDPSNNFRLHNGRSKEQRLKEQLGAQQEPVKKSIQESEAFLPQSIPEERYKMKSKPLGICLIIDCIGNETELLRDTFTSLGYEVQKFLHLSMHGISQILGQFACMPEHRDYDSFVCVLVSRGGSQSVYGVDQTHSGLPLHHIRRMFMGDSCPYLAGKPKMFFIQNYVVSEGQLEDSSLLEVDGPAMKNVEFKAQKRGLCTVHREADFFWSLCTADMSLLEQSHSSPSLYLQCLSQKLRQERGTIPGSGITESKDMHFSSLGCILLDVL

SEQ ID NO: 103 - DNA, 2717 bp, Homo sapiens
cagggtaacgctgtcttgtggacccgcacttcccacccgagacctctcactgagcccgagccgcgcgcgacatgagccacgggaagggaaccgacatgctcccggagatcgccgccgccgtgggcttcctctccagcctcctgaggacccggggctgcgtgagcgagcagaggcttaaggtcttcagcggggcgctccaggaggcactcacagagcactacaaacaccactggtttcccgaaaagccgtccaagggctccggctaccgctgcattcgcatcaaccacaagatggaccccatcatcagcagggtggccagccagatcggactcagccagccccagctgcaccagctgctgcccagcgagctgaccctgtgggtggacccctatgaggtgtcctaccgcattggggaggacggctccatctgcgtcttgtacgaggaggccccactggccgcctcctgtgggctcctcacctgcaagaaccaagtgctgctgggccggagcagcccctccaagaactacgtgatggcagtctccagctaggcccttccgcccccgccctgggcgccgccgtgctcatgctgccgtgacaacaggccaccacatacctcaacctggggaactgtatttttaaatgaagagctatttatatatattatttttttttaagaaaggaggaaaagaaaccaaaagttttttttaagaaaaaaaatccttcaagggagctgcttggaagtggcctccccaggtgcctttggagagaactgttgcgtgcttgagtctgtgagccagtgtctgcctataggagggggagctgttagggggtagacctagccaaggagaagtgggagacgtttggctagcaccccaggaagatgtgagagggagcaagcaaggttagcaactgtgaacagagaggtcgggatttgccctgggggaggaagagaggccaagttcagagctctctgtctcccccagccagacacctgcatccctggctcctctattactcaggggcattcatgcctggacttaaacaatactatgttatcttttcttttatttttctaatgaggtcctgggcagagagtgaaaaggcctctcctgattcctactgtcctaagctgcttttcttgaaatcatgacttgtttctaattctaccctcaggggcctgtagatgttgctttccagccaggaatctaaagctttgggttttctgagggggggaggagggaactggaggttattggggttaggatggaagggaactctgcacaaaacctttgctttgctagtgctgctttgtgtgtatgtgtggcaaataatttgggggtgatttgcaatgaaattttgggacccaaagagtatccactggggatgttttttggccaaaactcttccttttggaaccacatgaaagtcttgatgctgctgccatgatccctttgagaggtggctcaaaagctacagggaactccaggtcctttattactgccttcttttcaaaagcacaactctcctctaaccctcccctcccccttcccttctggtcgggtcatagagctaccgtattttctaggacaagagttctcagtcactgtgcaatatgccccctgggtcccaggagggtctggaggaaaactggctatcagaacctcctgatgccctggtgggcttagggaaccatctctcctgctctccttgggatgatggctggctagtcagccttgcatgtattccttggctgaatgggagagtgccccatgttctgcaagactacttggtattcttgtagggccgacactaaataaaagccaaaccttgggcactgttttttctccctggtgctcagagcacctgtgggaaaggttgctgtctgtctcagtacaatccaaatttgtcgtagacttgtgcaatatatactgttgtgggttggagaaaagtggaaagctacactgggaagaaactcccttccttcaatttctcagtgacattgatgaggggtcctcaaaagacctcgagtttcccaaaccgaatcaccttaagaaggacagggctagggcatttggccaggatggccaccctcctgctgttgccccttagtgaggaatcttcaccccacttcctctacccccaggttctcctccccacagccagtcccctttcctggatttctaaactgctcaattttgactcaaaggtgctatttaccaaacactctccctacccattcctgccagctctgcctccttttcaactctccacattttgtattgccttcccagacctgcttccagtctttattgctttaaagttcactttgggcccacagacccaagagctaattttctggtttgtgggttgaaacaaagctgtgaatcactgcaggctgtgttcttgcatcttgtctgcaaacaggtccctgcctttttagaagcagcctcatggtctcatgcttaatcttgtctctcttctcttctttatgatgttcactttaaaaacaacaaaacccctgagctggactgttgagcaggcctgtctctcctattaagtaaaaataaatagtagtagtatgtttgtaagctattctgacagaaaagacaaaggttactaattgtatgatagtgtttttatatggaagaatgtacagcttatggacaaatgtacacctttttgttactttaataaaaatgtagtaggataaaaaaaaa

SEQ ID NO: 104 - protein, 158 aa, Homo sapiens
MSHGKGTDMLPEIAAAVGFLSSLLRTRGCVSEQRLKVFSGALQEALTEHYKHHWFPEKPSKGSGYRCIRINHKMDPIISRVASQIGLSQPQLHQLLPSELTLWVDPYEVSYRIGEDGSICVLYEEAPLAASCGLLTCKNQVLLGRSSPSKNYVMAVSS

SEQ ID NO: 105 - DNA, 5397 bp, Homo sapiens
gcgcactggagccctggccagcgcgcagccttcccggcgccggcgggctgggtcttgggaattctggtttgctttggctcactcgctttttacaaaccactggatcttacatgcctctgtaccccccacttccactccatgtccccatgctcctgcgccagcaacaggacatgttctctggatgtcagctgagtcattaaagtaactctgcatgtcagtagacagaccttggtagaaccacaaggctcccagagacacccatctctcctcatttttttggtgtgtgtgtcttcaccgaacattcaaaactgtttctccaaagcgttttgcaaaaactcagactgttttccaaagcagaagcactggagtccccagcagaagcgatgggcagtgtgcgaaccaaccgctacagcatcgtctcttcagaagaagacggtatgaagttggccaccatggcagttgcaaatggctttgggaacgggaagagtaaagtccacacccgacaacagtgcaggagccgctttgtgaagaaagatggccactgtaatgttcagttcatcaatgtgggtgagaaggggcaacggtacctcgcagacatcttcaccacgtgtgtggacattcgctggcggtggatgctggttatcttctgcctggctttcgtcctgtcatggctgttttttggctgtgtgttttggttgatagctctgctccatggggacctggatgcatccaaagagggcaaagcttgtgtgtccgaggtcaacagcttcacggctgccttcctcttctccattgagacccagacaaccataggctatggtttcagatgtgtcacggatgaatgcccaattgctgttttcatggtggtgttccagtcaatcgtgggctgcatcatcgatgctttcatcattggcgcagtcatggccaagatggcaaagccaaagaagagaaacgagactcttgtcttcagtcacaatgccgtgattgccatgagagacggcaagctgtgtttgatgtggcgagtgggcaatcttcggaaaagccacttggtggaagctcatgttcgagcacagctcctcaaatccagaattacttctgaaggggagtatatccctctggatcaaatagacatcaatgttgggtttgacagtggaatcgatcgtatatttctggtgtccccaatcactatagtccatgaaatagatgaagacagtcctttatatgatttgagtaaacaggacattgacaacgcagactttgaaatcgtggtcatactggaaggcatggtggaagccactgccatgacgacacagtgccgtagctcttatctagcaaatgaaatcctgtggggccaccgctatgagcctgtgctctttgaagagaagcactactacaaagtggactattccaggttccacaaaacttacgaagtccccaacactcccctttgtagtgccagagacttagcagaaaagaaatatatcctctcaaatgcaaattcattttgctatgaaaatgaagttgccctcacaagcaaagaggaagacgacagtgaaaatggagttccagaaagcactagtacggacacgccccctgacatagaccttcacaaccaggcaagtgtacctctagagcccaggcccttacggcgagagtcggagatatgactgactgattccttctctggaatagttactttacaacacggtctgttggtcagaggcccaaaacagttatacagatgacggtactggtcaagatgggtcaagcaagcggccacaagggactgaggcaagcacaatggtttcaaagaaagactgtaagctccatgattagcataaagcactaaccatgtctccatgtgacccgatggcacatagatgttgtagaataagttatgggtttttatgttttgttttgtgtttttccaaaacttgaacttgcaggcaagccttggttgggtatttgatttatccagaatgcttctctttagggaacaaggatgtttttaatggcataacaaaggcaagactctgccttaatttttgaaaagctgctaactacatgaacacaaatgtgtatttttgttgcagtgtagttttccttttgtgtaattttaaagtcagtgttgaattttattgaaagctcatgatgcgcttcaaagtggcaagtatttggctattaactgccaaaacaagagcctgattttttgaggccagtaattcgtttgctagaattgattttttttctctctctctttgttacataagggcattatgtaacactagccgaatggtagcctctgggttgttgtttttttcttttcctccatgatgttaatgggttatctcaaattttaagttaaactacctaaaataaataccaaagataatgcatatttttgcacagtggagcttacacttaaaagaaaacaaagccccatgggctgccttgaaatcaagagacaataactttgaacctcagcaagaccttgaaccgccggttcattttgcaccttattcagaaaatagagcatcatactcaccgagtctagtcagtgtagtgcttttaaaaattttgtcctttcatgtaacttttttattttaagaggaagaagaagaaaggggcacacacacacaataccgacgtctatcctttcctgctaggcagtgctggccaggctcatgtgtagtgtgcgagatggtgatgtactcttatatttttctgggcttttccttttgcacattccaaaattcatttcataagacaagatcttcataggacctccttggcatcctggcattctcaaaactgagccatccagcatgaaagataaatgggtttaaacccttgctgctgaatttattgcctggactgtcaggacatcaccagcccaccttcaccttagggaagatgccacacctggcctccacacttgctcttctgatcagtctgtctggattgagtcctacagtgtcagatagggcggcaaatgccaaagcagggaaacagggaggtgtggacaagccagtttgatgcagcacttcagatcaagtgcttaggaaggagaggaaacttgccttttttatggcagaggatagtaatgaaaatgtctcagtattttagggtcaatgagagccataaaaatataacataatcacaagtaaaggagataatggtctaaaacagctatttcccttttctgtgtgcatacttatgactgaatgtgagctaagcattttctcctgtggagccctagagcaggttactaaggaaggacacattgttttccagaagcctcccctgcctggctgactgccttgctagaaacataattttttttttctcactgaagctcaataatggaactctttttttttttttttttaatttaaagttccctatttgtgaattctgggattactgacttttctttttaattggagtctcaaaatcaactctcttatggtattatatctctgtatgccattaaaaaacagcttgttctagaatcatgtattttgtaaactgatgtttgtgatggtctctggttcttgaacagccatatctgaatgccgtgcctgcaaaactatgacaatttttgctgttttcagccttcagatttgatggcttgggaaactgaggtgttattttcaatgaaacaaagaaagagatgttaagcaagtggttgttttagatccaaatgtaaaggcaggtttgggaaggtgtttaaagagttggaggaattggggattgagttgtaaagaaaacttacagaagaggcaacaatttggttcttgacagtgagaggatattgagggcttcagctgctgctattatgatgttttgcaaaggaaaataatcaaaccaaagagtattcagtgatatgtaaattaaatgaagatacagtggagaatgggggtgaccacaaaagaggctccccctaaacacacagtgctgccacttaaaaagacttgagaaatttgaaagggggtgggtatggggggggcaagaaagagggagggaaatctttcaacttatttctgaaaaagagaaaaaaatataaaatttctggtgcacaggtttgttttttcaagaaaattttgcagaagctatgtttttaaagtgtacattttataaagtttatcagatattttcatatttaaagccaaatgtaaatagaggtctgtaaagaaaaataattgccatagaaagtataatttcagtgcagtaatttctgagagctagtacctatatgctaccggttagcatggttttagcaaatatataccagccttataaggttcgtattgctatgttcttctgttatttatttcagcatggactgttcatttgaaacctttttctagttattagcgttttaacagttacaagctttaaatggcaattttttttttttttttttttttttttttttttttgtcaagagccaagacacaggtaatgcacgacattgattgctgcattttaccttcaaaatatttgtccttattgactgggtctccttaattaatgtacacatgtcattagaatgcagacggaggggactcaccatgaatatctggggttgattcccagatgtgtgttgcttctctattgcaagcagattccctgttggatttacttcggatttattcccttttaaagaatttttgcccatatctggaagggcactatatttttgggaggagccatagattcctggttatcctatttttaaacaaaatgtagacaaagtgaactctattttgattattgagaaaggagtagttttctatccctctaagagtatacttgaatcagacattttaaggatgtcactatggcactgttgtcatttccaaattcctagaaaagtttgttttactttgtttttattctgttaatgcattctttcttctctttacttcctttcttaccagtacactcctatctcaactctgtttatttgatgagttctgtcccgtaaatcatatttcccttacaattaataaatgtcacttcatattttataataaaccactcagtaaaagcaaaagcttgtcctgagaagtagagtgagttctttttcactctgtgtctaataatgttaaggtgggaaaaaaaaaagtgtggcatagctacctgcccatccccaaccctcagcaaagtagaatctcttttctggtaattttgggtttccgctctgggctctggcaagttgaacaatcctagccattgacaatcgtgatagttattattttcccatttgctgtctttttgtatctaaagtcttcctattgtactgcacaaaccatggattgtacatatttttatatattatgtcttattttattatttctaaataaaaaaattaaaaattgaaaaaaaaaaaaa

SEQ ID NO: 106 - protein, 427 aa, Homo sapiens
MGSVRTNRYSIVSSEEDGMKLATMAVANGFGNGKSKVHTRQQCRSRFVKKDGHCNVQFINVGEKGQRYLADIFTTCVDIRWRWMLVIFCLAFVLSWLFFGCVFWLIALLHGDLDASKEGKACVSEVNSFTAAFLFSIETQTTIGYGFRCVTDECPIAVFMVVFQSIVGCIIDAFIIGAVMAKMAKPKKRNETLVFSHNAVIAMRDGKLCLMWRVGNLRKSHLVEAHVRAQLLKSRITSEGEYIPLDQIDINVGFDSGIDRIFLVSPITIVHEIDEDSPLYDLSKQDIDNADFEIVVILEGMVEATAMTTQCRSSYLANEILWGHRYEPVLFEEKHYYKVDYSRFHKTYEVPNTPLCSARDLAEKKYILSNANSFCYENEVALTSKEEDDSENGVPESTSTDTPPDIDLHNQASVPLEPRPLRRESEI

SEQ ID NO: 107 - DNA, 2157 bp, Homo sapiens
cgatcctgccggagccccgccgccgccggcttggattctgaaaccttccttgtatccctcctgagacatctttgctgcaagatcgaggctgtcctctggtgagaaggtggtgaggcttcccgtcatattccagctctgaacagcaacatggggtgcaaagtcctgctcaacattgggcagcagatgctgcggcggaaggtggtggactgtagccgggaggagacgcggctgtctcgctgcctgaacacttttgatctggtggccctcggggtgggcagcacactgggtgctggtgtctacgtcctggctggagctgtggcccgtgagaatgcaggccctgccattgtcatctccttcctgatcgctgcgctggcctcagtgctggctggcctgtgctatggcgagtttggtgctcgggtccccaagacgggctcagcttacctctacagctatgtcaccgttggagagctctgggccttcatcaccggctggaacttaatcctctcctacatcatcggtacttcaagcgtagcgagggcctggagcgccaccttcgacgagctgataggcagacccatcggggagttctcacggacacacatgactctgaacgcccccggcgtgctggctgaaaaccccgacatattcgcagtgatcataattctcatcttgacaggacttttaactcttggtgtgaaagagtcggccatggtcaacaaaatattcacttgtattaacgtcctggtcctgggcttcataatggtgtcaggatttgtgaaaggatcggttaaaaactggcagctcacggaggaggattttgggaacacatcaggccgtctctgtttgaacaatgacacaaaagaagggaagcccggtgttggtggattcatgcccttcgggttctctggtgtcctgtcgggggcagcgacttgcttctatgccttcgtgggctttgactgcatcgccaccacaggtgaagaggtgaagaacccacagaaggccatccccgtggggatcgtggcgtccctcttgatctgcttcatcgcctactttggggtgtcggctgccctcacgctcatgatgccctacttctgcctggacaataacagccccctgcccgacgcctttaagcacgtgggctgggaaggtgccaagtacgcagtggccgtgggctccctctgcgctctttccgccagtcttctaggttccatgtttcccatgcctcgggttatctatgccatggctgaggatggactgctatttaaattcttagccaacgtcaatgataggaccaaaacaccaataatcgccacattagcctcgggtgccgttgctgctgtgatggccttcctctttgacctgaaggacttggtggacctcatgtccattggcactctcctggcttactcgttggtggctgcctgtgtgttggtcttacggtaccagccagagcagcctaacctggtataccagatggccagtacttccgacgagttagatccagcagaccaaaatgaattggcaagcaccaatgattcccagctggggtttttaccagaggcagagatgttctctttgaaaaccatactctcacccaaaaacatggagccttccaaaatctctgggctaattgtgaacatttcaaccagccttatagctgttctcatcatcaccttctgcattgtgaccgtgcttggaagggaggctctcaccaaaggggcgctgtgggcagtctttctgctcgcagggtctgccctcctctgtgccgtggtcacgggcgtcatctggaggcagcccgagagcaagaccaagctctcatttaaggttcccttcctgccagtgctccccatcctgagcatcttcgtgaacgtctatctcatgatgcagctggaccagggcacctgggtccggtttgctgtgtggatgctgataggcttcatcatctactttggctatggcctgtggcacagcgaggaggcgtccctggatgccgaccaagcaaggactcctgacggcaacttggaccagtgcaagtgacgcacagccccgccccccggaggtggcagcagccccgagggacgcccccagaggaccgggaggcaccccaccctccccaccagtgcaacagaaaccacctgcgtccacaccctcactgca

SEQ ID NO: 108 - protein, 629 aa, Homo sapiens
MGCKVLLNIGQQMLRRKVVDCSREETRLSRCLNTFDLVALGVGSTLGAGVYVLAGAVARENAGPAIVISFLIAALASVLAGLCYGEFGARVPKTGSAYLYSYVTVGELWAFITGWNLILSYIIGTSSVARAWSATFDELIGRPIGEFSRTHMTLNAPGVLAENPDIFAVIIILILTGLLTLGVKESAMVNKIFTCINVLVLGFIMVSGFVKGSVKNWQLTEEDFGNTSGRLCLNNDTKEGKPGVGGFMPFGFSGVLSGAATCFYAFVGFDCIATTGEEVKNPQKAIPVGIVASLLICFIAYFGVSAALTLMMPYFCLDNNSPLPDAFKHVGWEGAKYAVAVGSLCALSASLLGSMFPMPRVIYAMAEDGLLFKFLANVNDRTKTPIIATLASGAVAAVMAFLFDLKDLVDLMSIGTLLAYSLVAACVLVLRYQPEQPNLVYQMASTSDELDPADQNELASTNDSQLGFLPEAEMFSLKTILSPKNMEPSKISGLIVNISTSLIAVLIITFCIVTVLGREALTKGALWAVFLLAGSALLCAVVTGVIWRQPESKTKLSFKVPFLPVLPILSIFVNVYLMMQLDQGTWVRFAVWMLIGFIIYFGYGLWHSEEASLDADQARTPDGNLDQCK

SEQ ID NO: 109 - DNA, 2487 bp, Homo sapiens
ctgagcgccctccgctcgccccgagagagacccggccatgcaggagccgctgctgggagccgagggcccggactacgacaccttccccgagaagccgcccccgtcgccaggggacagggcgcgggtcgggaccctgcagaacaaaagggtgttcctggccaccttcgccgcagtgctcggcaatttcagctttgggtatgccctggtctacacatcccctgtcatcccagccctggagcgctccttggatcctgacctgcatctgaccaaatcccaggcatcctggtttgggtccgtgttcaccctgggagcagcggccggaggcctgagtgccatgatcctcaacgacctcctgggccggaagctgagcatcatgttctcagctgtgccgtcggcggccggctatgcgctcatggcgggtgcgcacggcctctggatgctgctgctcggaaggacgctgacgggcttcgccggggggctcacagctgcctgcatcccggtgtacgtgtctgagattgctcccccaggcgttcgtggggctctgggggccacaccccagctcatggcagtgttcggatccctgtccctctacgcccttggcctcctgctgccgtggcgctggctggctgtggccggggaggcgcctgtgctcatcatgatcctgctgctcagcttcatgcccaactcgccgcgcttcctgctctctcggggcagggacgaagaggccctgcgggcgctggcctggctgcgtgggacggacgtcgatgtccactgggagttcgagcagatccaggacaacgtccggagacagagcagccgagtatcgtgggctgaggcacgggccccacacgtgtgccggcccatcaccgtggccttgctgatgcgcctcctgcagcagctgacgggcatcacgcccatcctggtctacctgcagtccatcttcgacagcaccgctgtcctgctgccccccaaggacgacgcagccatcgttggggccgtgcggctcctgtccgtgctgatcgccgccctcaccatggacctcgcaggccgcaaggtgctgctcttcgtctcagcggccatcatgtttgctgccaacctgactctggggctgtacatccactttggccccaggcctctgagccccaacagcactgcgggcctggaaagcgagtcctggggggacttggcgcagcccctggcagcacccgctggctacctcaccctggtgcccctgctggccaccatgctcttcatcatgggctacgccgtgggctggggtcccatcacctggctgctcatgtctgaggtcctgcccctgcgtgcccgtggcgtggcctcagggctctgcgtgctggccagctggctcaccgccttcgtcctcaccaagtccttcctgccagtggtgagcaccttcggcctccaggtgcctttcttcttcttcgcggccatctgcttggtgagcctggtgttcacaggctgctgtgtgcccgagaccaagggacggtccctggagcagatcgagtccttcttccgcatggggagaaggtccttcttgcgctaggtcaaggtccccgcctggagggggccaaacccccagtggctgggcctctgtgttggctacaaacctgcaccctgggaccaagaggcagcagtcatccctgccaccagccagagcacaggaagagcagtgtgatggggcctcagcagcgggtgcccctggctcgggacaggtagcactgctgtccagccacagccccagcccaggcagcccacagtgctgcacgtagccatgggccgcaggagtgcatacaaccctgcatccagggacacggccctgctgggtgacctcaggcctagtccctttcccttgcgtgaaggacacgccccacagaaggctacggggaggactgagaggacagggctggaggcagccaagtaacgtagtcatatcatcgcgctctgatctggtggcatctggctgtgcaaggaagacccggctttgccctcacaagtcttatgggcaccacagggaacatcctggacttaaaaagccagggcaggccgggcacagtggctcacgcctgtaatcccagcactttgggaggccaaagcaggtggattacccaaggccaggagttcaagaccagcctggccaacatggtgaaaccccgtctctactaaaaaatacaaaaaagctgggtgtggtggcacacacccgtagttccagctacttgggaggctgaggcagcattgcttgaacccgggaggtggaggctgcaatgagctgagatcatgccattgcactccagcctgggcaacgagagtgaaactccgtccccaccccctgccaaaaaaaaaaaaaaaaaagccagggcaaaggacctggcgtggccacttcctcctgccccagcccaacctctgggaacaggcagctcctatctgcaaactgtgttcacccttttgtaaaaataaaggaactggacccgt

SEQ ID NO: 110 - protein, 507 aa, Homo sapiens
MQEPLLGAEGPDYDTFPEKPPPSPGDRARVGTLQNKRVFLATFAAVLGNFSFGYALVYTSPVIPALERSLDPDLHLTKSQASWFGSVFTLGAAAGGLSAMILNDLLGRKLSIMFSAVPSAAGYALMAGAHGLWMLLLGRTLTGFAGGLTAACIPVYVSEIAPPGVRGALGATPQLMAVFGSLSLYALGLLLPWRWLAVAGEAPVLIMILLLSFMPNSPRFLLSRGRDEEALRALAWLRGTDVDVHWEFEQIQDNVRRQSSRVSWAEARAPHVCRPITVALLMRLLQQLTGITPILVYLQSIFDSTAVLLPPKDDAAIVGAVRLLSVLIAALTMDLAGRKVLLFVSAAIMFAANLTLGLYIHFGPRPLSPNSTAGLESESWGDLAQPLAAPAGYLTLVPLLATMLFIMGYAVGWGPITWLLMSEVLPLRARGVASGLCVLASWLTAFVLTKSFLPVVSTFGLQVPFFFFAAICLVSLVFTGCCVPETKGRSLEQIESFFRMGRRSFLR

SEQ ID NO: 111 - DNA, 3458 bp, Homo sapiens
cttcctccctcccgctcgcttcttctcacgccgggagcaggctcgcgcctcgcaccgctgccccgcgagcagctcctcttctcccgaggcgcgcggggcgcccccgcgagccccgcggctgagaccccgcagcctggaggagggctgtccggggctttgggttgcacgttttcaaaaaatacctaatggtgaaaatgagacaatgattcctgtattgacatcaaaaaaagcaagtgaattaccagtcagtgaagttgcaagcattctccaagctgatcttcagaatggtctaaacaaatgtgaagttagtcataggcgagcctttcatggctggaatgagtttgatattagtgaagatgagccactgtggaagaagtatatttctcagtttaaaaatccccttattatgctgcttctggcttctgcagtcatcagtgttttaatgcatcagtttgatgatgccgtcagtatcactgtggcaatactattcgttgttacagttgcctttgttcaggaatatcgttcagaaaaatctcttgaagaattgagtaaacttgtgccaccagaatgccattgtgtgcgtgaaggaaaattggagcatacacttgcccgagacttggttccaggtgatacagtttgcctttctgttggggatagagttcctgctgacttacgcttgtttgaggctgtggatctttccattgatgagtccagcttgacaggtgagacaacgccttgttctaaggtgacagctcctcagccagctgcaactaatggagatcttgcatcgagaagtaacattgcctttatgggaacactggtcagatgtggcaaagcaaagggtgttgtcattggaacaggagaaaattctgaatttggggaggtttttaaaatgatgcaagcagaagaggcaccaaaaacccctctgcagaagagcatggacctcttaggaaaacaactttccttttactcctttggtataataggaatcatcatgttggttggctggttactgggaaaagatatcctggaaatgtttactattagtgtaagtttggctgtagcagcaattcctgaaggtctccccattgtggtcacagtgacgctagctcttggtgttatgagaatggtgaagaaaagggccattgtgaaaaagctgcctattgttgaaactctgggctgctgtaatgtgatttgttcagataaaactggaacactgacgaagaatgaaatgactgttactcacatatttacttcagatggtctgcatgctgaggttactggagttggctataatcaatttggggaagtgattgttgatggtgatgttgttcatggattctataacccagctgttagcagaattgttgaggcgggctgtgtgtgcaatgatgctgtaattagaaacaatactctaatggggaagccaacagaaggggccttaattgctcttgcaatgaagatgggtcttgatggacttcaacaagactacatcagaaaagctgaatacccttttagctctgagcaaaagtggatggctgttaagtgtgtacaccgaacacagcaggacagaccagagatttgttttatgaaaggtgcttacgaacaagtaattaagtactgtactacataccagagcaaagggcagaccttgacacttactcagcagcagagagatgtgtaccaacaagagaaggcacgcatgggctcagcgggactcagagttcttgctttggcttctggtcctgaactgggacagctgacatttcttggcttggtgggaatcattgatccacctagaactggtgtgaaagaagctgttacaacactcattgcctcaggagtatcaataaaaatgattactggagattcacaggagactgcagttgcaatcgccagtcgtctgggattgtattccaaaacttcccagtcagtctcaggagaagaaatagatgcaatggatgttcagcagctttcacaaatagtaccaaaggttgcagtattttacagagctagcccaaggcacaagatgaaaattattaagtcgctacagaagaacggttcagttgtagccatgacaggagatggagtaaatgatgcagttgctctgaaggctgcagacattggagttgcgatgggccagactggtacagatgtttgcaaagaggcagcagacatgatcctagtggatgatgattttcaaaccataatgtctgcaatcgaagagggtaaagggatttataataacattaaaaatttcgttagattccagctgagcacgagtatagcagcattaactttaatctcattggctacattaatgaactttcctaatcctctcaatgccatgcagattttgtggatcaatattattatggatggacccccagctcagagccttggagtagaaccagtggataaagatgtcattcgtaaacctcctcgcaactggaaagacagcattttgactaaaaacttgatacttaaaatacttgtttcatcaataatcattgtttgtgggactttgtttgtcttctggcgtgagctacgagacaatgtgattacacctcgagacacaacaatgaccttcacatgctttgtgttttttgacatgttcaatgcactaagttccagatcccagaccaagtctgtgtttgagattggactctgcagtaatagaatgttttgctatgcagttcttggatccatcatgggacaattactagttatttactttcctccgcttcagaaggtttttcagactgagagcctaagcatactggatctgttgtttcttttgggtctcacctcatcagtgtgcatagtggcagaaattataaagaaggttgaaaggagcagggaaaagatccagaagcatgtctggctctgggagaggagtggacagcagctggttgagatacatccccatctggagacaggactgccactgacagaagatgtgagctgtgtctaagtccagtcttgtgcccagccgtgtctgcgccttcactctttggaactctgcatacaacatcttagcaccatcttcctgcagctcttccttacctaaataaagaaacagcccaagggcagtatttctaaaagcactgtaacagcttttcattttctccacatatactacaaattctataaagaaagaaattaatttaaaaaaactaagatgtttttctcttctggcttcataaatgccttgctgtataaattgaaatattgatactgaactgtctttttaatgatgacctaactttattcaacccatcggaatttactttttccctgaaataagatcttttccactggtctactacctgaccataaacatgtctgcatttgaattctctaaaccctaaatctgtgtctatgaaaaatacaaatgactattaaatattattctctttactgttctctttcaccgaaaaaaaaaaaaaaaaaaaaaa

SEQ ID NO: 112 - protein, 923 aa, Homo sapiens [sequence omitted]

SEQ ID NO: 113 - DNA, 1221 bp, Homo sapiens
gcggcctgggcggccgcaccatggactcgggaaccgaggagtacgagctcaacggcggcctgcctccgggcacacccggctccccggacgcctcgccggcccgctggggctggaggcacgggcccatcaacgtgaaccattacgccagcaagaagagcgcagccgagagcatgctggacatcgcgctgctgatggccaacgcgtcccagctgaaggccgtcgtggaacagggccccagcttcgccttctatgtgcccctggtggtcctcatctccatctcccttgtgctgcagatcggcgtgggggtgctgctcatcttccttgtcaagtacgaccttaacaacccggacaagcacgccaagctggacttcctcaacaacctggccacgggcctggtgttcatcatcgtggtagtcaacatcttcatcacggccttcggggtccagaagcccttgatggacatggcaccccagcagtaggacacccaggaccctggatgctgcctgccctgcaactcagctgcccgaccccaggagtcgccatacctgtgaggtgtccacctccctgcacatggcactacccagactgccagagcccaggctggcctcatctgcaccatgtccccggaccagcccttgctctgactgcggccaagcaccacgcaggaggccactcttgtctctcascagctgttcccaggaggcagctccctcctggcacatgggggctggcacaatagcccagagggtcagaactggacagctgcagagacctgtgcccagagaagggtctcgacccactcaaggacacacagcaggtccgtggatgggctggatgagtgaccagggccagcctctgtctcaggacattccagaaggacaaggagatgtctctccctctcccaaagcaccagcgtccctgcctcccgtgggccctgtccgggttgcccctggtgaccccagcctctgtccacttcctaacccagggaccctgcacagccagaactgcctttggccctacggatggccactggctctggtctaaagtgcctgggcttggtggccatcaagagggagccagtcaggcctgtgagggccgtagaccttgtatataccctgcaccagcagtgaccgggcagagcccaaccccctccacgggggtcccagcacccacttttctaatcatgaatgaacaataaagcccacgctctttgtcaggcaa

SEQ ID NO: 114 - protein, 152 aa, Homo sapiens
MDSGTEEYELNGGLPPGTPGSPDASPARWGWRHGPINVNHYASKKSAAESMLDIALLMANASQLKAVVEQGPSFAFYVPLVVLISISLVLQIGVGVLLIFLVKYDLNNPDKHAKLDFLNNLATGLVFIIVVVNIFITAFGVQKPLMDMAPQQ

SEQ ID NO: 115 - DNA, 3247 bp, Homo sapiens
gaggagctctgcgcggcgcggcgggcgatccgagccgggacgggctgcaggcgggggtgctgcagaggacacgaggcggcgggctggagacatggaccgcggcgagcaaggtctgctgagaacagacccagtccctgaggaaggagaagatgttgctgccacgatcagtgccacagagaccctctcggaagaggagcaggaagagctaagaagagaacttgcaaaggtagaagaagaaatccagactctgtctcaagtgttagcagcaaaagagaagcatctagcagagatcaagcggaaacttggaatcaattctctacaggaactaaaacagaacattgccaaagggtggcaagacgtgacagcaacatctgcttacaagaagacatctgaaaccttatcccaggctggacagaaggcctcagctgctttttcgtctgttggctcagtcatcaccaaaaagctggaagatgtaaaaaactccccaacttttaaatcatttgaagaaaaggtcgaaaacttaaagtctaaagtagggggaaccaagcctgctggtggtgattttggagaagtcttgaattcggctgcaaatgctagtgccaccaccacggagcctcttccagaaaagacacaggagagcctgtgagattcctacctttgttctgctacccactgccagatgctgcaagcgaggtccaagcacatcttgtcaacatgcattgccatgaatttctaccagatgtgcttttatttagctttacatattcctttgaccaaatagtttgtgggttaaacaaaatgaaaatatcttcacctctattcttgggaaacaccctttagtgtacatttatgttcctttatttaggaaacaccattataaaaacacttatagtaaatggggacattcactataatgatctaagaagctacagattgtcatagttgttttcctgctttacaaaattgctccagatctggaatgccagtttgacctttgtcttctataatatttcctttttttcccctctttgaatctctgtatatttgattcttaactaaaattgttctcttaaatattctgaatcctggtaattaaaagtttgggtgtattttctttacctccaaggaaagaactactagctacaaaaaatattttggaataagcattgttttggtataaggtacatattttggttgaagacaccagactgaagtaaacagctgtgcatccaatttattatagttttgtaagtaacaatatgtaatcaaacttctaggtgacttgagagtggaacctcctatatcattatttagcaccgtttgtgacagtaaccatttcagtgtattgtttattataccacttatatcaacttatttttcaccaggttaaaattttaatttctacaaaataacattctgaatcaagcacactgtatgttcagtaggttgaactatgaacactgtcatcaatgttcagttcaaaagcctgaaagtttagatctagaagctggtaaaaatgacaatatcaatcacattaggggaaccattgttgtcttcacttaatccatttagcactatttaaaataagcacaccaagttatatgactaatataacttgaaaattttttatactgaggggttggtgataactcttgaggatgtaatgcattaataaaaatcaactcatcattttctacttgttttcaatgtgttggaaactgtaaaatgatactgtagaacctgtctcctactttgaaaactgaatgtcagggctgagtgaatcaaagtgtctagacatatttgcatagaggccaaggtattctattctaataactgcttactcaacactaccaccttttccttatactgtatatgattatggcctacaatgttgtatttgttatttattaaattgtgattgttttattattgtttatgccaaatgttaactgccaagcttggagtgacctaaagcattttttaaaagcatggctagatttacttcagtataaattatcttatgaaaaccaaattttaaaagccacaggtgttgattgttataaaataacatgctgccattcttgattgctagagtttttgttagtactttggatgcaattaaaactatgtgctatcacatgtgaaaagcttaataaattccatctatcagtagtataggtctcaatatttattatgagaccagtggtctggaaacagcttgttgtaccgaatcaactggagtctatgcttaaaaaaaaaaatttttttttaaccatccttaaattattgcttaatggtatcatattaacatattctaaataagggctttaaggcacaggctgttgaagcattttctcagaggagtggatctgtagaagtctgtctttctatagaaatattgtgcttactcaagtgttaaattattttttctatgaactagtctacttcttaaaattcaaacatattcttttgatcacattgtttcttgagcatcctgccctgctactaacttttcaacaaggcaaaatggagtaaagtggcaatttctttagatgagtgaaataccctcaagtctcttttctgcccaaaaagggaaaagtgatagaaatgggggtggcaagtggggtgagtggatgaaggtgggtattgggggtggctgtgaaagaaaataatggagaatcacttttctagacatctacctatacttaatctaagaaacaaagtaatctactgtaaagtactctgccccttgaaagaagtattaaaaagagtgaggatggatttagaaaaaaacatgaatttagaaatattcaaaatggtttttgtggcagattcaatattatgaattcacagatatttaaagaatgagaaacatagtaattagtagaaatgccagaaacagttcctggttcctcttgtgtttgacactaagaaaatagcaagagtgtgaaatctcagatacttatgaaatctcacagatgtaaggactcaagtgtagaagaaaatatccccttcttacaaaaagaaatgtcaatttatggagtttgtgggaaatagggcaagaattcttatgcttatgagagccaagtagtcagtggaagagagtagagctcaaaactggattatcaccttagcaacttagaatagtttgaaatagaaaaaaagtatttaatttggatctggatctgttaagatatgcacagtctattttttgtatagtattggaaaataaaaatgctataatttg

SEQ ID NO: 116 - protein, 184 aa, Homo sapiens
MDRGEQGLLRTDPVPEEGEDVAATISATETLSEEEQEELRRELAKVEEEIQTLSQVLAAKEKHLAEIKRKLGINSLQELKQNIAKGWQDVTATSAYKKTSETLSQAGQKASAAFSSVGSVITKKLEDVKNSPTFKSFEEKVENLKSKVGGTKPAGGDFGEVLNSAANASATTTEPLPEKTQESL

SEQ ID NO: 117 - DNA, 1414 bp, Homo sapiens
gaattcgcactgctctgagaatttgtgagcagcccctaacaggctgttacttcactacaactgacgatatgatcatcttaatttacttatttctcttgctatgggaagacactcaaggatggggattcaaggatggaatttttcataactccatatggcttgaacgagcagccggtgtgtaccacagagaagcacggtctggcaaatacaagctcacctacgcagaagctaaggcggtgtgtgaatttgaaggcggccatctcgcaacttacaagcagctagaggcagccagaaaaattggatttcatgtctgtgctgctggatggatggctaagggcagagttggataccccattgtgaagccagggcccaactgatgatttggaaaaactggcattattgattatggaatccgtctcaataggagtgaaagatgggatgcctattgctacaacccacacgcaaaggagtgtggtggcgtctttacagatccaaagcgaatttttaaatctccaggcttcccaaatgagtacgaagataaccaaatctgctactggcacattagactcaagtatggtcagcgtattcacctgagttttttagattttgaccttgaagatgacccaggttgcttggctgattatgttgaaatatatgacagttacgatgatgtccatggctttgtgggaagatactgtggagatgagcttccagatgacatcatcagtacaggaaatgtcatgaccttgaagtttctaagtgatgcttcagtgacagctggaggtttccaaatcaaatatgttgcaatggatcctgtatccaaatccagtcaaggaaaaaatacaagtactacttctactggaaataaaaactttttagctggaagatttagccacttataaaaaaaaaaaaggatgatcaaaacacacagtgtttatgttggaatcttttggaactcctttgatctcactgttattattaacatttatttattatttttctaaatgtgaaagaaatacataatttagggaaaattggaaaatataggaaactttaaacgagaaaatgaaacctctcataatcccactgcatagaaataacaagcgttaacattttcatatttttttctttcagtcatttttgtatttgtggtatatgtatatatgtacctatatgtatttgcatttgaaattttggaatcctgctctatgtacagttttgtattatactttttaaatcttgaactttatgaacattttctgaaatcattgattattctacaaaaacatgattttaaacagctgtaaaatattctatgatatgaatgttttatgcattatttaagcctgtctctattgttggaatttcaggtcattttcataaatattgttgcaataaatatccttcggaattc

SEQ ID NO: 118 - protein, 277 aa, Homo sapiens
  MISC_FEATURE (103)..(104): wherein "X" equals any naturally occuring amino acid.
MIILIYLFLLLWEDTQGWGFKDGIFHNSIWLERAAGVYHREARSGKYKLTYAEAKAVCEFEGGHLATYKQLEAARKIGFHVCAAGWMAKGRVGYPIVKPGPNXXFGKTGIIDYGIRLNRSERWDAYCYNPHAKECGGVFTDPKRIFKSPGFPNEYEDNQICYWHIRLKYGQRIHLSFLDFDLEDDPGCLADYVEIYDSYDDVHGFVGRYCGDELPDDIISTGNVMTLKFLSDASVTAGGFQIKYVAMDPVSKSSQGKNTSTTSTGNKNFLAGRFSHL

SEQ ID NO: 119 - DNA, 2289 bp, Homo sapiens
ggcacgaggcgggggcggccgaggcggacgagggcggcggcgactggagcttcattgactgcgagatggaggaggtggacctgcaggacctgcccagcgccaccatcgcctgtcacctggacccgcgcgtgttcgtggacggcctgtgccgggccaaatttgagtccctctttaggacgtatgacaaggacatcacctttcagtattttaagagcttcaaacgagtcagaataaacttcagcaaccccttctccgcagcagatgccaggctccagctgcataagactgagtttctgggaaaggaaatgaagttatattttgctcagaccttacacataggaagctcacacctggctccgccaaatccagacaagcagtttctgatctcccctcccgcctctccgccagtgggatggaaacaagtggaagatgcgaccccagtcataaactatgatctcttatatgccatctccaagctggggccaggggaaaagtatgaattgcacgcagcgactgacaccactcccagcgtggtggtccatgtatgtgagagtgatcaagagaaggaggaagaagaggaaatggaaagaatgaggagacctaagccaaaaattatccagaccaggaggccggagtacacgccgatccacctcagctgaactggcacgcgacgaggacgcattccaaatcatactcacgggaggaatcttttactgtggaggtggctggtcacgacttcttcggaggtggcagccgagatcggggtggcagaaatcccagttcatgttgctcagaagagaatcaaggccgtgtccccttgttctaatgctgcacaccagttactgttcatggcacccgggaatgacttgggccaatcactgagtttgtggtgatcgcacaaggacatttgggactgtcttgagaaaacagataatgatagtgttttgtacttgttcttttctggtaggttctgtctgtgccaagggcaggttgatcagtgagctcaggagagagcttcctgtttctaagtggcctgcaggggccactctctactggtaggaagaggtaccacaggaagccgcctagtgcagagaggttgtgaaaacagcagcaatgcaatgtggaaattgtagcgtttcctttcttccctcatgttctcatgtttgtgcatgtatattactgatttacaagactaacctttgttcgtatataaagttacaccgttgttgttttacatcttttgggaagccaggaaagcgtttggaaaacgtatcacctttcccagattctcggattctcgactctttgcaacagcacttgcttgcggaactcttcctggaatgcattcactcagcatccccaaccgtgcaacgtgtaacttgtgcttttgcaaaagaagttgatctgaaattcctctgtagaatttagcttatacaattcagagaatagcagtttcactgccaacttttagtgggtgagaaattttagtttaggtgtttgggatcggacctcagtttctgttgtttcttttatgtggtggtttctatacatgaatcatagccaaaaacttttttggaaactgttggttgagatagttggttcttttaccccacgaagacatcaagatacacttgtaaataaagctgatagcatatattcatacctgttgtacacttgggtgaaaagtatggcagtgggagactaagatgtattaacctacctgtgaatcatatgttgtaggaaaagctgttcccatgtctaacaggacttgaattcaaagcatgtcaagtggatagtagatctgtggcgatatgagagggatgcagtgcctttccccattcattcctgatggaattgttatactaggttaacatttgtaatttttttctagttgtaatgtgtatgtctggtaaataggtattatattttggccttacaataccgtaacaatgtttgtcattttgaaatacttaatgccaagtaacaatgcatgctttggaaatttggaagatggttttattctttgagaagcaaatatgtttgcattaaatgctttgattgttcatatcaagaaattgattgaacgttctcaaaccctgtttacggtacttggtaagagggagccggtttgggagagaccattgcatcgctgtccaagtgtttcttgttaagtgcttttaaactggagaggctaacctcaaaatattttttttaactgcattctataataaatgggcacagtatgctccttacagaaaaaaaaaaaaaaaaaaaaaaaaaaaaaaaaaa

SEQ ID NO: 120 - protein, 197 aa, Homo sapiens
MEEVDLQDLPSATIACHLDPRVFVDGLCRAKFESLFRTYDKDITFQYFKSFKRVRINFSNPFSAADARLQLHKTEFLGKEMKLYFAQTLHIGSSHLAPPNPDKQFLISPPASPPVGWKQVEDATPVINYDLLYAISKLGPGEKYELHAATDTTPSVVVHVCESDQEKEEEEEMERMRRPKPKIIQTRRPEYTPIHLS

SEQ ID NO: 121 - DNA, 1987 bp, Homo sapiens
cctcctttcctactatgagaccttcatccagcagggaggggacgacgtgcagcagctgtgtgaggcgggtgaggaggagtttctggagatcatggcacttgtgggcatggccaccaagcccctccatgtccggcgcctgcagaaggcactgagagagtgggccaccaatccagggctcttcagtcaaccagtgcctgctgttcccgtctccagcatcccgctcttcaagatctctgagactgcgggtacccggaaagggagcatgagcaatgggcatggcagcccaggggaaaaggcaggcagtgcccgcagttttagccccaagagcccccttgaacttggagagaagctatcaccactgcctgggggacctggggcaggggacccccggatctggccaggccggagcactccagagtcggacgttggggcaggaggagaagaggaggctggctcgccccccttctccccccctgcagggggaggagtccctgaggggactggggctggggggctggcagcaggtgggactgggggtggtccagaccgactggagccagagatggtacgcatggtggtggaaagtgtggagaggatcttccggagcttccaaggggatgctggggaggtcacatccctgctaaagctgaataagaagctggcacggagcgttgggcacatctttgagatggatgataatgacagccagaaggaagaggagatccgcaaatacagcatcatctatggccgtttcgactctaagcggcgggagggcaagcagctcagcctgcacgagctcaccatcaacgaggctgctgcccagttctgcatgagggacaacacactcttattacggagagtggagctcttctctttgtcccgccaagtagcccgagagagcacctacttgtcctccttgaagggctccaggcttcaccctgaagaactgggaggccctccactgaagaagctgaaacaagaggttggagaacagagtcaccctgaaatccagcagcctcccccaggccctgagtcctatgtacccccataccgccccagcctggaggaggacagcgccagcctgtctggggagagtctggatggacatttgcaggagttcgaggaagggctgctggacagatgtcctgccccaggaccccatcccgcgctggtggagggtcgcaggagcagcgtgaaagtggaggctgaggccagccggcagtgagggttggactggtgtcttcagacccaggacctcagacttctggctcacacagacccccacgctctccatccccggaatctagtcacaaccctggatccttcctctgcccttctcctgcctccccacctgctccatgggcataagactgtggggcttcaagcaataacaagcagaggcctggagagaggacacaaggagggtgcgtggtgccctcacccctgcccagagcgagggggcaaggactctgcctccagggcatctggggttttcccctccctcacacaacacactcccattctctttaggtttgcaccagtggtgtgagcagttggactcagtttggacaagggggagaaagggggacttccctgggaaggtccagctaaaagtggcaacatttgcccccagaattgggggcctgggaacactggacctgctccttctcccctctccttccccgtttttgtgcttctggtttgtttctttaattaatttaacaagtgctgcagtttgccctcccattcccatctatcccccaagtcctttgcaatttcttccctgccctacataggggcggtgggtgtgggatcccttcactggccccctcgggaggcctgggttggactcagggtctcctccagctgggggctggaccgcagcacctatctgagcagttagagcgtctttcttttcagattgtgtacagtagattatttattttgttattttggaataaaatttattttatggcttaggaaaaaa

SEQ ID NO: 122 - protein, 407 aa, Homo sapiens
LLSYYETFIQQGGDDVQQLCEAGEEEFLEIMALVGMATKPLHVRRLQKALREWATNPGLFSQPVPAVPVSSIPLFKISETAGTRKGSMSNGHGSPGEKAGSARSFSPKSPLELGEKLSPLPGGPGAGDPRIWPGRSTPESDVGAGGEEEAGSPPFSPPAGGGVPEGTGAGGLAAGGTGGGPDRLEPEMVRMVVESVERIFRSFQGDAGEVTSLLKLNKKLARSVGHIFEMDDNDSQKEEEIRKYSIIYGRFDSKRREGKQLSLHELTINEAAAQFCMRDNTLLLRRVELFSLSRQVARESTYLSSLKGSRLHPEELGGPPLKKLKQEVGEQSHPEIQQPPPGPESYVPPYRPSLEEDSASLSGESLDGHLQEFEEGLLDRCPAPGPHPALVEGRRSSVKVEAEASRQ

SEQ ID NO: 123 - DNA, 2240 bp, Homo sapiens
ccccgcgggctgcagcgagccaggcatgctcactggcgcaggcccggcccgcagcccgagcaggaagcgccggcgtaggcggccccctgcgctgccagctggagccgggcggagccagcgccccggcgcagggtggctctgccagtccccgcgcgcctgggcggccgcacacgtgtccaggcgtcacgtccgcgcgcgcccccggggcttgcgtcagcggctgttccagaagcgggtgggccagggctctgcgcaccgctggggttcggggcccgggacgccgccgggaggagggcaccgcgcggggtccgacgcggaggcgtgctcggaacgccgggggctgcggagtgcatcagcgcggtccagccctccgcctgccgggcgccgagcgtctccgccgcccggacctgggctgggcgccgtggcgttgcctcggagctcgctgcccgcggggcgcgcaccgccttgacccgggcggccccgcggcaggcaggcgcccgcagttccatggttggttcggagcgcgatgagccgcccgtcctccaccggccccagcgctaataaaccctgcagcaagcagccgccgccgcagccccagcacactccgtccccggctgcgcccccggccgccgccaccatctcggctgcgggccccggctcgtccgcggtgcccgccgcggcggcggtgatctcgggccccggcggcggcggcggggccggcccggtgtccccgcagcaccacgagctgacctcgctcttcgagtgtccggtctgctttgactatgtcctgcctcctattctgcagtgccaggccgggcacctggtgtgtaaccaatgccgccagaagttgagctgctgcccgacgtgcaggggcgccctgacgcccagcatcaggaacctggctatggagaaggtggcctcggcagtcctgtttccctgtaagtatgccaccacgggctgttccctgaccctgcaccatacggagaaaccagaacatgaagacatatgtgaataccgcccctactcctgcccatgtcctggtgcttcctgcaagtggcaggggtccctggaagctgtgatgtcccatctcatgcacgcccacaagagcattaccacccttcaggaagaagacatcgtctttctagctacagacattaacttgccaggggctgtcgactgggtgatgatgcagtcatgttttggccatcacttcatgctggtgctggagaaacaagagaagtacgaaggccaccagcagttttttgccatcgtcctgctcattggcacccgcaagcaagccgagaactttgcctacagactggagttgaatgggaaccggcggagattgacctgggaggccacgccccgctcgattcatgacggtgtggctgcggccatcatgaacagcgactgccttgttttcgacacagccatagcacatctttttgcagataatgggaaccttggaatcaatgttactatttctacatgttgtccatgatgtgacttccgtaaaccttcaaaattatttgggcatactgctctatgtttaataaaggtttttatagatgttttattccatatgtcttcacaagtcaggacccacaattacccgtgttttgtttgaacagcagtgtcccatctggcttcgacccaacaaagttcattaacctgggatgaatggggttggcctgttggtgatttggatgctgttctgtgatctaaaacaactcttattgaattgtatttactccctaaacaacacttgacaggctgttgcacagggcttctatagatcagtgtgttaggaatgggaggccccttcctgcctgccttcccatattggtcccttgacattgacaaaagcacagtgactgtcagcagattcctttacttttgtttgtgggaggtaggaattgttttaatgcattttaaacagtgtttctgaaattggatggctggctaatagacactgaatcacccggagtgcttatcttaaaattgcagatttagggagcctgccaatttaacagtctcatcagtgatctttcaacagtaatgtttgagaattactgggttaaattgtggaaagggtccagattttaaaggtgctttaaggttgccctctgccgatactgtttgtctttctactgtttcatcccctaacttcccccaaccctcaaattaaaactagaactatagatccacatgaacgcacgcctgagatttggccactcacc

SEQ ID NO: 124 - protein, 324 aa, Homo sapiens
MSRPSSTGPSANKPCSKQPPPQPQHTPSPAAPPAAATISAAGPGSSAVPAAAAVISGPGGGGGAGPVSPQHHELTSLFECPVCFDYVLPPILQCQAGHLVCNQCRQKLSCCPTCRGALTPSIRNLAMEKVASAVLFPCKYATTGCSLTLHHTEKPEHEDICEYRPYSCPCPGASCKWQGSLEAVMSHLMHAHKSITTLQEEDIVFLATDINLPGAVDWVMMQSCFGHHFMLVLEKQEKYEGHQQFFAIVLLIGTRKQAENFAYRLELNGNRRRLTWEATPRSIHDGVAAAIMNSDCLVFDTAIAHLFADNGNLGINVTISTCCP

SEQ ID NO: 125 - DNA, 5574 bp, Homo sapiens
ctatcactaaactgtcattgaattgtactgcattagaaaggaactcaaatatgtgtgacggcaatggacatcttgtcacctttagttggcctttttcaatgagttaagcattatatgtgtgttaccaaaaaattattttttatagttcagagaaccatttttgttggatgtgtaatttggaagttttgtttacattatgtccttaggggttttctttgttttaacagcatgcagcttgacagaaatacactacccaaaaagggactaagatataccccatcatctcggcaggccaaccaagaagagggcaaagagtggttgcgttctcattctactggagggcttcaggacactggcaaccagtcacctctggtttccccttctgccatgtcatcttctgcagctggaaaataccacttttctaacttggtgagcccaacaaatttgtctcaatttaaccttcccgggcccagcatgatgcgctcaaacagcatcccagcccaagactcttccttcgatctctatgatgactcccagctttgtgggagtgccacttctctggaggaaagacctcgtgccatcagtcattcgggctcattcagagacagcatggaagaagttcatggctcttcattatcactggtgtccagcacttcttctctttactctacagctgaagaaaaggctcattcagagcaaatccataaactgcggagagagctggttgcatcacaagaaaaagttgctaccctcacatctcagctttcagcaaatgctcaccttgtagcagcttttgaaaagagcttagggaatatgactggccgattgcaaagtctaactatgacagcggaacaaaaggaatctgaacttatagaactaagagaaaccattgaaatgctgaaggctcagaattctgctgcccaggcggctattcagggagcactgaatggtccagaccatcctcccaaagatcttcgcatcagaagacagcattcctctgaaagtgtttctagtatcaacagtgccacaagccattccagtattggcagtggtaatgatgccgactccaagaagaagaaaaagaaaaactgggtgaactctagaggaagtgagctgagaagttctttcaaacaagcctttgggaagaaaaagtccaccaagcctccttcatcacattctgacattgaagagcttactgattcatcccttccggcatcccccaagttaccccataatgctggtgactgtggctcagcatccatgaagccctcacaatctgcttcagcgatctgtgaatgcacagaagctgaggcagagataattctgcagctgaagagcgagctcagagaaaaggaattaaaattaacggatattcggctggaggccctcagctctgctcatcatcttgatcagatccgggaagccatgaaccggatgcagaatgaaattgaaatactgaaagctgaaaatgaccggttgaaggcagaaactggtaacacagctaagcctactcggccaccgtcagaatcctcaagcagcacctcctcttcatcttccaggcagtcattaggactttctctaaacaatttgaacatcacagaggctgttagctcagatattttgctagatgatgctggtgatgcaactggacataaagatggccgcagtgtgaaaattatagtctccataagcaagggctatggtcgagcaaaggaccaaaaatctcaggcatatttgataggatccattggtgttagtggaaaaaccaagtgggatgtcttagatggtgtaataagacgtctctttaaggaatatgtattccgaattgatacatccactagccttggtctgagctctgactgcattgctagctactgtataggagacttaattagatcccataacctagaagtgcctgaattgctgccttgtggataccttgttggagataataacatcatcactgtgaacctcaaaggggtagaagaaaatagtttggacagttttgtttttgatacgctgattcctaaaccaattacccaaaggtactttaacttgttgatggagcatcacagaattatactctcaggaccgagtggtactggaaagacctatttggcaaacaaacttgctgaatatgtaataaccaaatctggaaggaaaaaaacagaggatgcaattgccacttttaatgtggaccacaagtcaagtaaggaattgcaacaatatctagctaacctggctgaacagtgcagtgctgataataatggagtggagctcccagttgtaataattcttgataatcttcatcatgtgggctctctgagtgatatcttcaatggttttctcaattgtaaatacaacaaatgtccatatattattggaacaatgaatcagggagtttcttcatcaccaaatctagagctgcatcacaatttcaggtgggtattatgtgcaaatcatacagaaccagtgaaaggctttttaggcagatatcttcgaagaaaactcatagagatagaaattgaaaggaacattcgcaataatgacctagtcaaaattatagattggattccgaagacgtggcatcatctcaacagttttttggaaacacacagttcttctgacgttaccattggtccccgactattccttccttgccccatggatgtagaaggttctagagtatggttcatggatctctggaactattctttagtaccttatattctggaggcagtgagagagggtcttcagatgtatgggaaacgcacaccatgggaagatccttcaaagtgggtgcttgacacatatccatggagctcagcaactctgcctcaggagagcccagccttacttcagctgcgaccagaagatgttgggtatgaaagctgcacatccactaaggaagccacaacctcaaagcacattccgcaaactgacacagaaggagatcccctgatgaatatgctaatgaaactccaagaagcagccaattactcgagcacacaaagctgcgacagcgaaagcaccagccaccatgaagacattttggattcatctcttgaatctaccctctagagggtgaaaaaagttaagggaaaagactttgcttttaaaaaaatgtttcaaaagaaaggtattttcactaaaccactgccagtataaaagcaccctgtcaagggccctgacccagagttgtggtctccaaggaggcagcagaactaagtctgaaccgccaagatgctaaattgcaatggaagcttaactttagtttatttctaagcattttttatatctgtggagtaatagaaagctccattactcaactggaaaggaccctaatgacagggcaactgaacagattgcacatgggatagccaaactggactttctttgtttcctctttaaaagtttacaatgcagaccattttttgtcccttccttttgtttcctctgaggggctgttcgccccaggcagggtccatctttctgatctgtccaacctcctttgtgccacacggtgctggtcacagggcttcagtagtgtttgtgttgtgcgctcaccccattccagaacaaatccaagaggccagtcctccataagcacaaatggaattgtgcaaccaccagaaaaacactactgtggcaaactggagaagtgccaatttaattctaactgccacgttctcatgatgtgctccaccaactttttagtatatgagtcactggttttataaggttgtttttaccacagtggtctttttaaaccacctgcccactcccttaacaagagttttataccaattattagtcaacactgataaaaggcttttttagggctttatttgtttgagccttttcagtgaaagaaggaacatttcctatggtgctgtctcactgccttaaaacagatttctatgacagtttaacagttggtttaaatcctaaaccattggtaatttccactgtcttttcatttacaaccaagcaacaccagttaacatagtagcctcatctctatatatctttctcttttttttttttttttgaagaaatggataggagaaagatcagtatttttagccttgtgaatagatcgctttgcctatcctccaaaatattaaaataacccagaaatgctctttgaccgtcacttaaaacctaagacatgtggcgaaattccatccagttctaagtgaaagagtttcagaaggcaggagattttgaattattatccagcagggctggaagcactagatgcagcatgagcacaactattcggctttccttccctattgtttttgtttttttaatgagttttgacgcatgttgttttgattgctattgttgtacatgagaaattcagcattaaagaacactgaagcggtaaggtcactgtggaagaggaagcgtttatactgtaaaagaaggttagatttgcacagtctactgggtaggtattgtaaataataatttttaaaacttgcacaaatcaaaacaaacacaaacaaaattgtattttatcctattggtgttaagaggtgtttcacttgctgagatttcctgtacattgcaaacaaatacagaatgcaaaccctcaaagctgtattatctggtgtgtttgtcctgtatttacagttgtttttgactatgcaggagctatcagtgctagagtgagcatgcttcaaaactgtacatgaagccaatatatttttggataagtaaaactgtctgaaagtacatctgtcatggcaggctttaaagagagtgcatgaaaactgatcagtcattggagaagttaccaccacacacaaaggacaggttttaagtttatgaaacccaagggctaggccatggtatagacttcttctatgagtgtgtgaaaatgtgttacttttaggacgtgtatttggtgctactctctgtgaccaccaatgggtcagttgctatagaacaacaacaccacgaaacatctgtgcagttttcagagtgtcacaaagtcaataggtccttacacggtgctattgccctaagggaaatccgaactgaatttatgcacatagaattgtcaccctgactttgaagcctcaaacatggatcaaatctgttgtgaaacatcaatatatgtagctggatgagtgactagtttcccttgtataatatgtgatctaagaaaattgctaatctttccctgccattttgagaaacacagtccaaacatgagcataaacagaatttcctgcaatacatcccagtaggtccacctagtttacaacttaaactagtttgtgaaacatttgtctgtatacattttatattttgtacattttgatgtaacatatcatgtaaataggcagaaacagtgaaataaatcatctgaaaagttttgtagtctttgtaaagccccaacaataagtacttggtgtcaatggacttaactggatgatgtattttctattggtttattgttcctctagcttgtaaaccagcttgcatatatttttttgcaaatgtgcaccctgtatctgtctaaattattactttgccattaaagtggaattatttattgac

SEQ ID NO: 126 - protein, 988 aa, Homo sapiens
MCVTKKLFFIVQRTIFVGCVIWKFCLHYVLRGFLCFNSMQLDRNTLPKKGLRYTPSSRQANQEEGKEWLRSHSTGGLQDTGNQSPLVSPSAMSSSAAGKYHFSNLVSPTNLSQFNLPGPSMMRSNSIPAQDSSFDLYDDSQLCGSATSLEERPRAISHSGSFRDSMEEVHGSSLSLVSSTSSLYSTAEEKAHSEQIHKLRRELVASQEKVATLTSQLSANAHLVAAFEKSLGNMTGRLQSLTMTAEQKESELIELRETIEMLKAQNSAAQAAIQGALNGPDHPPKDLRIRRQHSSESVSSINSATSHSSIGSGNDADSKKKKKKNWVNSRGSELRSSFKQAFGKKKSTKPPSSHSDIEELTDSSLPASPKLPHNAGDCGSASMKPSQSASAICECTEAEAEIILQLKSELREKELKLTDIRLEALSSAHHLDQIREAMNRMQNEIEILKAENDRLKAETGNTAKPTRPPSESSSSTSSSSSRQSLGLSLNNLNITEAVSSDILLDDAGDATGHKDGRSVKIIVSISKGYGRAKDQKSQAYLIGSIGVSGKTKWDVLDGVIRRLFKEYVFRIDTSTSLGLSSDCIASYCIGDLIRSHNLEVPELLPCGYLVGDNNIITVNLKGVEENSLDSFVFDTLIPKPITQRYFNLLMEHHRIILSGPSGTGKTYLANKLAEYVITKSGRKKTEDAIATFNVDHKSSKELQQYLANLAEQCSADNNGVELPVVIILDNLHHVGSLSDIFNGFLNCKYNKCPYIIGTMNQGVSSSPNLELHHNFRWVLCANHTEPVKGFLGRYLRRKLIEIEIERNIRNNDLVKIIDWIPKTWHHLNSFLETHSSSDVTIGPRLFLPCPMDVEGSRVWFMDLWNYSLVPYILEAVREGLQMYGKRTPWEDPSKWVLDTYPWSSATLPQESPALLQLRPEDVGYESCTSTKEATTSKHIPQTDTEGDPLMNMLMKLQEAANYSSTQSCDSESTSHHEDILDSSLESTL

SEQ ID NO: 127 - DNA, 2697 bp, Homo sapiens
atataaaggcgccgccgtccttgcccccaggactcggccccatggggacgccgccggccgccgctggcgcatggcgggtaggagctgtggcgcggggccttccaggagtctgagctatgagtggcccctgtggagagaagcctgtcctggaagccagccccaccatgagtctgtgggaatttgaggacagccacagccgtcagggcaccccaaggccgggtcaagagctggccgctgaggaggcctcggccctggaactgcagatgaaggtggacttcttccggaagctgggctattcatccacggagatccacagcgtcctgcagaagctgggcgtccaggcagacaccaacacggtgctgggtgagctggtgaaacacgggacagccaccgagcgggagcgccagacctcaccggacccctgccctcagctccctctagtcccgcggggtggtggcacccctaaggctcccaacctggagcctccactcccagaagaggaaaaggagggcagcgacctgagaccagtggtcatcgatgggagcaacgtggccatgagccatgggaacaaggaggtcttctcctgccggggcatcctgctggcagtgaactggtttctggagcggggccacacagacatcacagtgtttgtgccatcctggaggaaggagcagcctcggcccgacgtgcccatcacagaccagcacatcctgcgggaactggagaagaagaagatcctggtgttcacaccatcacgacgcgtgggtggcaagcgggtggtgtgctatgacgacagattcattgtgaagctggcctacgagtctgacgggatcgtggtttccaacgacacataccgtgacctccaaggcgagcggcaggagtggaagcgcttcatcgaggagcggctgctcatgtactccttcgtcaatgacaagtttatgccccctgatgacccactgggccggcacgggcccagcctggacaacttcctgcgtaagaagccactcactttggagcacaggaagcagccgtgtccctatggaaggaaatgcacctatgggatcaagtgccgattcttccacccagagcggccaagctgcccccagcgctctgtggcagatgagctccgtgccaatgctctcctctcaccccccagagccccaagcaaggacaaaaatggccggcggccttcaccttcatcccagtccagctctctgctaacagagagtgagcagtgcagcctggatgggaagaagctgggggcccaggcatccccagggtcccgccaagagggtctaacacagacctatgccccatcaggcaggagcctcgcacctagcgggggcagtggcagcagctttgggcccacagactggctcccacagacgctggactcactcccgtacgtctcccaggattgcctggactcgggcattggctccctggagagccagatgtcggaactttggggggttcgaggaggaggccctggtgagccgggcccaccccgagccccttacacgggctacagtccctatggatctgagctcccagccaccgcagccttctctgcctttggccgggccatgggtgctggccacttcagtgtccctgccgactacccacccgcgccccctgcctttccacctcgagagtactggtctgaaccatacccactgcccccacccacatcagtccttcaggagcccccagtgcagagcccaggggctggcaggagcccgtggggcagggcagacagcctggccaaggagcaggccagcgtgtatactaagctgtgtggtgtgtttcccccgcacctggtggaggctgtgatggggcgcttcccacagctcctggacccccagcagctggctgccgagatcctctcctacaagtcccagcaccccagtgagtaagctgcctgtggctggcaagggcagcacccccagcctccaagggccgtcaggctgggctttgggccattgagcagcccattcccagccctgaggcccaccccagaggctggacagagggaggattcaagtcgggaaggaaacccacaaaccaaagatactgtaggattggttctggcccatgcagcacctctagctgtctgcctcagtgggtcagaagcgatcaccctgttgatacacattgtatctctgtagtttaaggagacgctgccggtaacggcgtcggtccgtggctgaggcccaaaccgtcttttctctcagagggtggggagggaggtgggggcagcagaggcctgggctgggtgccctgtgcacgccaccccacttccgccctacccctgggacgttggccttggctggctagttgggcaccgtgtgcctgccctccaagggcctcctctacgccaatgaggcctcatctgtgctctcgctgggcacgtggcttcatgtcagtaagcaagatgcttcttaataacccaccttctgccccactctattccttatcctgctgcccctgtaggggtcaagggccctccgtctacaccctcttcttctcctccatcctttattcagagtcatctcgcccttccccatgggtgggggaacctgtgtttgtttgtgtgcacatgtaaattttaaatattttaagcagaaagtccttacctcctgtaacacatcaataaagtacaatcattgtgagccctttcaaaaaaaaaaaaaaaaa

SEQ ID NO: 128 - protein, 599 aa, Homo sapiens
MSGPCGEKPVLEASPTMSLWEFEDSHSRQGTPRPGQELAAEEASALELQMKVDFFRKLGYSSTEIHSVLQKLGVQADTNTVLGELVKHGTATERERQTSPDPCPQLPLVPRGGGTPKAPNLEPPLPEEEKEGSDLRPVVIDGSNVAMSHGNKEVFSCRGILLAVNWFLERGHTDITVFVPSWRKEQPRPDVPITDQHILRELEKKKILVFTPSRRVGGKRVVCYDDRFIVKLAYESDGIVVSNDTYRDLQGERQEWKRFIEERLLMYSFVNDKFMPPDDPLGRHGPSLDNFLRKKPLTLEHRKQPCPYGRKCTYGIKCRFFHPERPSCPQRSVADELRANALLSPPRAPSKDKNGRRPSPSSQSSSLLTESEQCSLDGKKLGAQASPGSRQEGLTQTYAPSGRSLAPSGGSGSSFGPTDWLPQTLDSLPYVSQDCLDSGIGSLESQMSELWGVRGGGPGEPGPPRAPYTGYSPYGSELPATAAFSAFGRAMGAGHFSVPADYPPAPPAFPPREYWSEPYPLPPPTSVLQEPPVQSPGAGRSPWGRADSLAKEQASVYTKLCGVFPPHLVEAVMGRFPQLLDPQQLAAEILSYKSQHPSE

SEQ ID NO: 129 - DNA, 2737 bp, Homo sapiens
agagtccgcgccctgcgtccgcgaccaggaggatcggaccttcgccttcgctgtcgccgccgccgccgcccgcggccgtcggggctattagtgaaagatggtggatcgcttggcaaacagtgaagcaaatactagacgtataagtatagtggaaaactgttttggagcagctggtcaacctttaactatacctggacgagttcttattggagaaggagtattgactaagttgtgcaggaaaaagcccaaagcaaggcagtttttcttgtttaatgatattcttgtatatggcaatattgtcatccagaagaaaaaatataacaaacaacatattattcccctggaaaatgtcactattgattccatcaaagatgagggagacttaaggaatggatggctaatcaagacaccaactaaatcttttgcagtttatgctgccactgctacggagaaatcagaatggatgaatcatataaataaatgtgttactgatttactctccaaaagtgggaagacacccagtaatgaacatgctgctgtctgggttcctgactctgaggcaactgtatgtatgcgttgtcagaaagcaaaattcacacctgttaatcgtcgccaccattgccgcaaatgtggttttgttgtctgtgggccctgctctgaaaagagatttcttcttcccagccagtcctctaagcctgtgcggatttgtgacttctgctatgacctgctttctgctggggacatggccacatgccagcctgctagatcagactcttacagccagtcattgaagtctcctttaaatgatatgtctgatgatgatgacgatgatgatagcagtgactaaggacacatttgggagtatttaatcaggtgtggctatctgagaaatcaactttgggggaaatgtaagattctgagctctctctctgttttgttctagccatgaatttgcctgagaaacttgtaacctatgtgcctcaatatattccatagaaagtaggtccccctgccttctcccactcctcacactcttctacagggataggcttttgcaaatatatcagataaattttttgtttcttgtttatttttaggttattttcttggaaggttgggaaaagatgtttgttttaacaggtcatgtactacgttgttgttttcatttctgttataagtaaaactaaaagcacagaatggtgggaaaggggctataatgtggttcattaataatgttagcagcttttttctaaccatcctgtctaatggttaagacaccagtaacaaaaacacatgatttggaaatactttggctttttcatatacctagtggtgccttatcataatagcactgttacatgaaataagcccctaccttcttactttctggtttgttgaaaaaatacactggtgctctttgaagtgataaaatgagtgtttatgaatgggtgtaattaggaaatacttctcatctgacagctacaaataactaagtttggaggtattttcactctatatgaataaatatttttccataaaatagttgtgattatatttttgttttatataggtcccaaattataattgtcaaatatatattttaaattaataaaagttgtcattcttaggaatttggtttgaaatttatcagttatacagaattgtcatactgcattagcttctacctttagtaagacatattttttaggtataaattcttatgctttaacattatttctggattgaaaatcttataaaacccttgaaaataaacagtctcttttttacaaagcctgtgttagagcacagatttacctaggcttgaagatttggaagaaataatatgtaagaatggcctcaaggcagaccactttaagtttggctagacttcatatcgtggaagtattgtctatttcagtgtgaaactatcttgaatttgcaaatatagtgttatattttataaagttttgtaaaatcccaaacaatatttctatttttgtaaaacaattgtatgtataatctgtatttgaaatcattttgcaatctatggaaatagagtagcaattgctatttctaaattgtgaactttaagtcaatctagatttattttgagaagtaattgttcactctttacttttgaggcagccattaggttgaaagtatatatttatcatataaaacttgatgcgttttgcactactctttccatttatatgctgcaaacaactacagtctttgaaatatggaaaatcagcagtctaaagtttgttttaaattctaaatttaaaaaatcttcaaatctgaatataccgcaaatgtcatgagaagtttgattcagtaacttgtgatggaggattctttggtatcttactgtttggttaaggcactaattttacttacctattagattttgaaagtatctgagatatacaaatctccctgtaggaaatgtgaaagaaaagcacaacaaaactagggttttttgttcatttgcttgcttttatgattttttttggtttgttttaatatcaggtggatttttgtttctaagcaatatatacataaaatcaaccaacatatctgaaaaggatcatgaaacctgagaaatgctaatggagatttgctggtacataggaatctagcaaattcaggaaccaaggggaaatgttgtgagataacatttacattgtcaacctttattgactttgtttttacaataaaaaatattttacaactt

SEQ ID NO: 130 - protein, 249 aa, Homo sapiens
MVDRLANSEANTRRISIVENCFGAAGQPLTIPGRVLIGEGVLTKLCRKKPKARQFFLFNDILVYGNIVIQKKKYNKQHIIPLENVTIDSIKDEGDLRNGWLIKTPTKSFAVYAATATEKSEWMNHINKCVTDLLSKSGKTPSNEHAAVWVPDSEATVCMRCQKAKFTPVNRRHHCRKCGFVVCGPCSEKRFLLPSQSSKPVRICDFCYDLLSAGDMATCQPARSDSYSQSLKSPLNDMSDDDDDDDSSD

SEQ ID NO: 131 - DNA, 6698 bp, Homo sapiens
catgttgccctggggggaacctgccagccccgtagcactgcccaccccacccactgtggtctgttgtaccccactgctggggtggtggttccaatgagacagggcacaccaaactccatctggctgttactgaggcggagacacgggtgatgattggctttctggggagagaggaagtcctgtgattggccagatctctggagcttgccgacgcggtgtgaggacgctcccacggaggccggaattggctgtgaaaggactgaggcagccatctgggggtagcgggcactcttatcagagcggctggagccggaccatcgtcccagagagctggggcagggggccgtgcccaatctccagggctcctggggccactgctgacctggctggatgcatcgggcagtggatcctccaggggcccgcgctgcacgggaagcctttgcccttgggggcctgagctgtgctggggcctggagctcctgcccgcctcatccccctcctcgtagcgcatggctgcctggaggcagatgctcagccagcattgggcagcccccgcttcctgctcccctacccccttcacatggcagtagttctgggcaccccagcaaaccatattatgctccaggggcgcccactccaagacccctccatgggaagctggaatccctgcatggctgtgtgcaggcattgctccgggagccagcccagccagggctttgggaacagcttgggcaactgtacgagtcagagcacgatagtgaggaggccacacgctgctaccacagcgcccttcgatacggaggaagcttcgctgagctggggccccgcattggccgactgcagcaggcccagctctggaactttcatactggctcctgccagcaccgagccaaggtcctgcccccactggagcaagtgtggaacttgctacaccttgagcacaaacggaactatggagccaagcggggaggtcccccggtgaagcgagctgctgaacccccagtggtgcagcctgtgcctcctgcagcactctcaggcccctcaggggaggagggcctcagccctggaggcaagcgaaggagaggctgcaactctgaacagactggccttcccccagggctgccactgcctccaccaccattaccaccaccaccaccaccaccaccaccacccctgcctggcctggctaccagccccccatttcagctaaccaagccagggctgtggagtaccctgcatggagatgcctggggcccagagcgcaagggttcagcacccccagagcgccaggagcagcggcactcgctgcctcacccatatccatacccagctccagcgtacaccgcgcacccccctggccaccggctggtcccggctgctcccccaggcccaggcccccgccccccaggagcagagagccatggctgcctgcctgccacccgtccccccggaagtgaccttagagagagcagagttcagaggtcgcggatggactccagcgtttcaccagcagcaaccaccgcctgcgtgccttacgccccttcccggccccctggcctccccggcaccaccaccagcagcagcagtagcagcagcagcaacactggtctccggggcgtggagccgaacccaggcattcccggcgctgaccattaccaaactcccgcgctggaggtctctcaccatggccgcctggggccctcggcacacagcagtcggaaaccgttcttgggggctcccgctgccactccccacctatccctgccacctggaccttcctcaccccctccacccccctgtccccgcctcttacgccccccaccaccccctgcctggttgaagggtccggcctgccgggcagcccgagaggatggagagatcttagaagagctcttctttgggactgagggacccccccgccctgccccaccacccctcccccatcgcgagggcttcttggggcctccggcctcccgcttttctgtgggcactcaggattctcacacccctcccactcccccaaccccaaccaccagcagtagcaacagcaacagtggcagccacagcagcagccctgctgggcctgtgtcctttcccccaccaccctatctggccagaagtatagacccccttccccggcctcccagcccagcacagaacccccaggacccacctcttgtacccctgactcttgccctgcctccagcccctccttcctcctgccaccaaaatacctcaggaagcttcaggcgcccggagagcccccggcccagggtctccttcccaaagacccccgaggtggggccggggccacccccaggccccctgagtaaagccccccagcctgtgccgcccggggttggggagctgcctgcccgaggccctcgactctttgattttccccccactccgctggaggaccagtttgaggagccagccgaattcaagatcctacctgatgggctggccaacatcatgaagatgctggacgaatccattcgcaaggaagaggaacagcaacaacacgaagcaggcgtggccccccaacccccgctgaaggagccctttgcatctctgcagtctcctttccccaccgacacagcccccaccactactgctcctgctgtcgccgtcaccaccaccaccaccaccaccaccaccaccacggccacccaggaagaggagaagaagccaccaccagccctaccaccaccaccgcctctagccaagttccctccaccctctcagccacagccaccaccacccccaccccccagcccggccagcctgctcaaatccttggcctccgtgctggagggacaaaagtactgttatcgggggactggagcagctgtttccacccggcctgggcccttgcccaccactcagtattcccctggccccccatcaggtgctaccgccctgccgcccacctcagcggcccctagcgcccagggctccccacagccctctgcttcctcgtcatctcagttctctacctcaggcgggccctgggcccgggagcgcagggcgggcgaagagccagtcccgggccccatgacccccacccaaccgcccccacccctatctctgccccctgctcgctctgagtctgaggtgctagaagagatcagccgggcttgcgagacccttgtggagcgggtgggccggagtgccactgacccagccgacccagtggacacagcagagccagcggacagtgggactgagcgactgctgccccccgcacaggccaaggaggaggctggcggggtggcggcagtgtcaggcagctgtaagcggcgacagaaggagcatcagaaggagcatcggcggcacaggcgggcctgtaaggacagtgtgggtcgtcggccccgtgagggcagggcaaaggccaaggccaaggtccccaaagaaaagagccgccgggtgctggggaacctggacctgcagagcgaggagatccagggtcgtgagaagtcccggcccgatcttggcggggcctccaaggccaagccacccacagctccagcccctccatcagctcctgcaccttctgcccagcccacacccccgtcagcctctgtccctggaaagaaggctcgggaggaagccccagggccaccgggtgtcagccgggccgacatgctgaagctgcgctcacttagtgaggggccccccaaggagctgaagatccggctcatcaaggtagagagtggtgacaaggagacctttatcgcctctgaggtggaagagcggcggctgcgcatggcagacctcaccatcagccactgtgctgctgacgtcgtgcgcgccagcaggaatgccaaggtgaaagggaagtttcgagagtcctacctttcccctgcccagtctgtgaaaccgaagatcaacactgaggagaagctgccccgggaaaaactcaacccccctacacccagcatctatctggagagcaaacgggatgccttctcacctgtcctgctgcagttctgtacagaccctcgaaatcccatcacagtgatccggggcctggcgggctccctgcggctcaacttgggcctcttctccaccaagaccctggtggaagcgagtggcgaacacaccgtggaagttcgcacccaggtgcagcagccctcagatgagaactgggatctgacaggcactcggcagatctggccttgtgagagctcccgttcccacaccaccattgccaagtacgcacagtaccaggcctcatccttccaggagtctctgcaggaggagaaggagagtgaggatgaggagtcagaggagccagacagcaccactggaacccctcctagcagcgcaccagacccgaagaaccatcacatcatcaagtttggcaccaacatcgacttgtctgatgctaagcggtggaagccccagctgcaggagctgctaaagctgcccgccttcatgcgggtaacatccacgggcaacatgctgagccacgtgggccacaccatcctgggcatgaacacggtgcagctgtacatgaaggtgcccggcagccgaacgccaggccaccaggagaataacaacttctgctccgtcaacatcaacattggcccaggcgactgcgagtggttcgcggtgcacgagcactactgggagaccatcagcgctttctgtgatcggcacggcgtggactacttgacgggttcctggtggccaatcctggatgatctctatgcatccaatattcctgtgtaccgcttcgtgcagcgacccggagacctcgtgtggattaatgcggggactgtgcactgggtgcaggccaccggctggtgcaacaacattgcctggaacgtggggcccctcaccgcctatcagtaccagctggccctggaacgatacgagtggaatgaggtgaagaacgtcaaatccatcgtgcccatgattcacgtgtcatggaacgtggctcgcacggtcaaaatcagcgaccccgacttgttcaagatgatcaagttctgcctgctgcagtccatgaagcactgccaggtgcaacgcgagagcctggtgcgggcagggaagaaaatcgcttaccagggccgtgtcaaggacgagccagcctactactgcaacgagtgcgatgtggaggtgtttaacatcctgttcgtgacaagtgagaatggcagccgcaacacgtacctggtacactgcgagggctgtgcccggcgccgcagcgcaggcctgcagggcgtggtggtgctggagcagtaccgcactgaggagctggctcaggcctacgacgccttcacgctggtgagggcccggcgggcgcgcgggcagcggaggagggcactggggcaggctgcagggacgggcttcgggagcccggccgcgcctttccctgagcccccgccggctttctccccccaggccccagccagcacgtcgcgatgaggccggacgccccgcccgcctgcctgcccgcgcaaggcgccgcggggccaccagcacatgcctgggctggacctaggtcccgcctgtggccgagaagggggtcgggcccagcccttccaccccattggcagctcccctcacttaatttattaagaaaaactttttttttttttttagcaaatatgaggaaaaaaggaaaaaaaatgggagacgggggagggggctggcagcccctcgcccaccagcgcctcccctcaccgactttggcctttttagcaacagacacaaggaccaggctccggcggcggcgggggtcacatacgggttccctcaccctgccagccgcccgcccgcccggcgcagatgcacgcggctcgtgtatgtacatagacgttacggcagccgaggtttttaatgagattctttctatgggctttacccctcccccggaacctccttttttacttccaatgctagctgtgacccctgtacatgtctctttattcacttggttatgatttgtattttttgttcttttcttgtttttttgtttttaatttataacagtcccactcacctctatttattcatttttgggaaaacccgacctcccacacccccaagccatcctgcccgcccctccagggaccgcccgtcgccgggctctccccgcgccccagtgtgtgtccgggcccggcccgaccgtctccacccgtccgcccgcggctccagccgggttctcatggtgctcaaacccgctcccctcccctacgtcctgcactttctcggaccagtccccccactcccgacccgaccccagccccacctgagggtgagcaactcctgtactgtaggggaagaagtgggaactgaaatggtattttgtaaaaaaaaataaataaaataaaaaaattaaaggttttaaagaaagaactatgaggaaaaggaaccccgtccttcccagccccggccaactttaaaaaacacagaccttcacccccacccccttttctttttaagtgtgaaacaacccagggccagggcctcactggggcagggacaccccggggtgagtttctctggggctttattttcgttttgttggttgttttttctccacgctggggctgcggaggggtggggggtttacagtcccgcaccctcgcactgcactgtctctctgccccaggggcagaggggtcttcccaaccctacccctattttcggtgatttttgtgtgagaatattaatattaaaaataaacggag

SEQ ID NO: 132 - protein, 1682 aa, Homo sapiens
PGWMHRAVDPPGARAAREAFALGGLSCAGAWSSCPPHPPPRSAWLPGGRCSASIGQPPLPAPLPPSHGSSSGHPSKPYYAPGAPTPRPLHGKLESLHGCVQALLREPAQPGLWEQLGQLYESEHDSEEATRCYHSALRYGGSFAELGPRIGRLQQAQLWNFHTGSCQHRAKVLPPLEQVWNLLHLEHKRNYGAKRGGPPVKRAAEPPVVQPVPPAALSGPSGEEGLSPGGKRRRGCNSEQTGLPPGLPLPPPPLPPPPPPPPPPLPGLATSPPFQLTKPGLWSTLHGDAWGPERKGSAPPERQEQRHSLPHPYPYPAPAYTAHPPGHRLVPAAPPGPGPRPPGAESHGCLPATRPPGSDLRESRVQRSRMDSSVSPAATTACVPYAPSRPPGLPGTTTSSSSSSSSNTGLRGVEPNPGIPGADHYQTPALEVSHHGRLGPSAHSSRKPFLGAPAATPHLSLPPGPSSPPPPPCPRLLRPPPPPAWLKGPACRAAREDGEILEELFFGTEGPPRPAPPPLPHREGFLGPPASRFSVGTQDSHTPPTPPTPTTSSSNSNSGSHSSSPAGPVSFPPPPYLARSIDPLPRPPSPAQNPQDPPLVPLTLALPPAPPSSCHQNTSGSFRRPESPRPRVSFPKTPEVGPGPPPGPLSKAPQPVPPGVGELPARGPRLFDFPPTPLEDQFEEPAEFKILPDGLANIMKMLDESIRKEEEQQQHEAGVAPQPPLKEPFASLQSPFPTDTAPTTTAPAVAVTTTTTTTTTTTATQEEEKKPPPALPPPPPLAKFPPPSQPQPPPPPPPSPASLLKSLASVLEGQKYCYRGTGAAVSTRPGPLPTTQYSPGPPSGATALPPTSAAPSAQGSPQPSASSSSQFSTSGGPWARERRAGEEPVPGPMTPTQPPPPLSLPPARSESEVLEEISRACETLVERVGRSATDPADPVDTAEPADSGTERLLPPAQAKEEAGGVAAVSGSCKRRQKEHQKEHRRHRRACKDSVGRRPREGRAKAKAKVPKEKSRRVLGNLDLQSEEIQGREKSRPDLGGASKAKPPTAPAPPSAPAPSAQPTPPSASVPGKKAREEAPGPPGVSRADMLKLRSLSEGPPKELKIRLIKVESGDKETFIASEVEERRLRMADLTISHCAADVVRASRNAKVKGKFRESYLSPAQSVKPKINTEEKLPREKLNPPTPSIYLESKRDAFSPVLLQFCTDPRNPITVIRGLAGSLRLNLGLFSTKTLVEASGEHTVEVRTQVQQPSDENWDLTGTRQIWPCESSRSHTTIAKYAQYQASSFQESLQEEKESEDEESEEPDSTTGTPPSSAPDPKNHHIIKFGTNIDLSDAKRWKPQLQELLKLPAFMRVTSTGNMLSHVGHTILGMNTVQLYMKVPGSRTPGHQENNNFCSVNINIGPGDCEWFAVHEHYWETISAFCDRHGVDYLTGSWWPILDDLYASNIPVYRFVQRPGDLVWINAGTVHWVQATGWCNNIAWNVGPLTAYQYQLALERYEWNEVKNVKSIVPMIHVSWNVARTVKISDPDLFKMIKFCLLQSMKHCQVQRESLVRAGKKIAYQGRVKDEPAYYCNECDVEVFNILFVTSENGSRNTYLVHCEGCARRRSAGLQGVVVLEQYRTEELAQAYDAFTLVRARRARGQRRRALGQAAGTGFGSPAAPFPEPPPAFSPQAPASTSR

SEQ ID NO: 133 - DNA, 4447 bp, Homo sapiens
ctctcagtgtctccaactttgcgctggaagaaaaacttcccgcgcgccggcagaactgcagcgcctcctcttagtgactccgggagcttcggctgtagccggctctgcgcgcccttccaacgaataatagaaattgttaattttaacaatccagagcaggccgacgaggctttgctctcccgacccgaactaaagctccctcgctccgtgcgctgctacgagcggtgtctcctggggctccaatgcagcgagctgtgcccgaggggttcggaaggcgcaagctgggcagcgacatggggaacgcggagcgggctccggggtctcggagctttgggcccgtacccacgctgctgctgctcgccgcggcgctactggccgtgtcggacgcactcgggcgcccctccgaggaggacgaggagctagtggtgccggagctggagcgcgccccgggacacgggaccacgcgcctccgcctgcacgcctttgaccagcagctggatctggagctgcggcccgacagcagctttttggcgcccggcttcacgctccagaacgtggggcgcaaatccgggtccgagacgccgcttccggaaaccgacctggcgcactgcttctactccggcaccgtgaatggcgatcccagctcggctgccgccctcagcctctgcgagggcgtgcgcggcgccttctacctgctgggggaggcgtatttcatccagccgctgcccgccgccagcgagcgcctcgccaccgccgccccaggggagaagccgccggcaccactacagttccacctcctgcggcggaatcggcagggcgacgtaggcggcacgtgcggggtcgtggacgacgagccccggccgactgggaaagcggagaccgaagacgaggacgaagggactgagggcgaggacgaagggcctcagtggtcgccgcaggacccggcactgcaaggcgtaggacagcccacaggaactggaagcataagaaagaagcgatttgtgtccagtcaccgctatgtggaaaccatgcttgtggcagaccagtcgatggcagaattccacggcagtggtctaaagcattaccttctcacgttgttttcggtggcagccagattgtacaaacaccccagcattcgtaattcagttagcctggtggtggtgaagatcttggtcatccacgatgaacagaaggggccggaagtgacctccaatgctgccctcactctgcggaacttttgcaactggcagaagcagcacaacccacccagtgaccgggatgcagagcactatgacacagcaattcttttcaccagacaggacttgtgtgggtcccagacatgtgatactcttgggatggctgatgttggaactgtgtgtgatccgagcagaagctgctccgtcatagaagatgatggtttacaagctgccttcaccacagcccatgaattaggccacgtgtttaacatgccacatgatgatgcaaagcagtgtgccagccttaatggtgtgaaccaggattcccacatgatggcgtcaatgctttccaacctggaccacagccagccttggtctccttgcagtgcctacatgattacatcatttctggataatggtcatggggaatgtttgatggacaagcctcataatcccatacagctcccaggcgatctccctggcacctcgtacgatgccaaccggcagtgccagtttacatttggggaggactccaaacactgccctgatgcagccagcacatgtagcaccttgtggtgtaccggcacctctggtggggtgctggtgtgtcaaaccaaacacttcccgtgggcggatggcaccagctgtggagaagggaaatggtgtatcaacggcaagtgtgtgaacaaaaccgacagaaagcattttgatacgccttttcatggaaactggggaatgtgggggccttggggagactgttcgagaacgtgcggtggaggagtccagtacacgatgagggaatgtgacaacccagtcccaaagaatggagggaagtactgtgaaggcaaacgagtgcgctacagatcctgtaaccttgaggactgtccagacaataatggaaaaacctttagagaggaacaatgtgaagcacacaacgagttttcaaaagcttcctttgggagtgggcctgcggtggaatggattcccaagtacgctggcgtctcaccaaaggacaggtgcaagctcatctgccaagccaaaggcattggctacttcttcgttttgcagcccaaggttgtagatggtactccatgtagcccagattccacctctgtctgtgtgcaaggacagtgtgtaaaagctggttgtgatcgcatcatagactccaaaaagaagtttgataaatgtggtgtttgcgggggaaatggatctacttgtaaaaaaatatcaggatcagttactagtgcaaaacctggatatcatgatatcatcacaattccaactggagccaccaacatcgaagtgaaacagcggaaccagaggggatccaggaacaatggcagctttcttgccatcaaagctgctgatggcacatatattcttaatggtgactacactttgtccaccttagagcaagacattatgtacaaaggtgttgtcttgaggtacagcggctcctctgcggcattggaaagaattcgcagctttagccctctcaaagagcccttgaccatccaggttcttactgtgggcaatgcccttcgacctaaaattaaatacacctacttcgtaaagaagaagaaggaatctttcaatgctatccccactttttcagcatgggtcattgaagagtggggcgaatgttctaagtcatgtgaattgggttggcagagaagactggtagaatgccgagacattaatggacagcctgcttccgagtgtgcaaaggaagtgaagccagccagcaccagaccttgtgcagaccatccctgcccccagtggcagctgggggagtggtcatcatgttctaagacctgtgggaagggttacaaaaaaagaagcttgaagtgtctgtcccatgatggaggggtgttatctcatgagagctgtgatcctttaaagaaacctaaacatttcatagacttttgcacaatggcagaatgcagttaagtggtttaagtggtgttagctttgagggcaaggcaaagtgaggaagggctggtgcagggaaagcaagaaggctggagggatccagcgtatcttgccagtaaccagtgaggtgtatcagtaaggtgggattatgggggtagatagaaaaggagttgaatcatcagagtaaactgccagttgcaaatttgataggatagttagtgaggattattaacctctgagcagtgatatagcataataaagccccgggcattattattattatttcttttgttacatctattacaagtttagaaaaaacaaagcaattgtcaaaaaaagttagaactattacaacccctgtttcctggtacttatcaaatacttagtatcatgggggttgggaaatgaaaagtaggagaaaagtgagattttactaagacctgttttactttacctcactaacaatggggggagaaaggagtacaaataggatctttgaccagcactgtttatggctgctatggtttcagagaatgtttatacattatttctaccgagaattaaaacttcagattgttcaacatgagagaaaggctcagcaacgtgaaataacgcaaatggcttcctctttccttttttggaccatctcagtctttatttgtgtaattcattttgaggaaaaaacaactccatgtatttattcaagtgcattaaagtctacaatggaaaaaaagcagtgaagcattagatgctggtaaaagctagaggagacacaatgagcttagtacctccaacttcctttctttcctaccatgtaaccctgctttgggaatatggatgtaaagaagtaacttgtgtctcatgaaaatcagtacaatcacacaaggaggatgaaacgccggaacaaaaatgaggtgtgtagaacagggtcccacaggtttggggacattgagatcacttgtcttgtggtggggaggctgctgaggggtagcaggtccatctccagcagctggtccaacagtcgtatcctggtgaatgtctgttcagctcttctgtgagaatatgattttttccatatgtatatagtaaaatatgttactataaattacatgtactttataagtattggtttgggtgttccttccaagaaggactatagttagtaataaatgcctataataacatatttatttttatacatttatttctaatgaaaaaaacttttaaattatatcgcttttgtggaagtgcatataaaatagagtatttatacaatatatgttactagaaataaaagaacacttttggaaaaaaaaaaa

SEQ ID NO: 134 - protein, 967 aa, Homo sapiens [sequence omitted]

SEQ ID NO: 135 - DNA, 2129 bp, Homo sapiens
ggcacgagggctgcccgggctgcgcggcgtctgcaggcgccaccgctgcctctttccggctgtgaccctcctcgccggcgccgcttggctgcgtcctccgactccccgcgccgccgagaccaggctcccgctccggttgcggccgcaccgccctccgcggccgccccctggggatccagcgagcgcggtcgtccttggtggaaggaaccatgaactggcatctccccctcttcctcttggcctctgtgacgctgccttccatctgctcccacttcaatcctctgtctctcgaggaactaggctccaacacggggatccaggttttcaatcagattgtgaagtcgaggcctcatgacaacatcgtgatctctccccatgggattgcgtcggtcctggggatgcttcagctgggggcggacggcaggaccaagaagcagctcgccatggtgatgagatacggcgtaaatggagttggtaaaatattaaagaagatcaacaaggccatcgtctccaagaagaataaagacattgtgacagtggctaacgccgtgtttgttaagaatgcctctgaaattgaagtgccttttgttacaaggaacaaagatgtgttccagtgtgaggtccggaatgtgaactttgaggatccagcctctgcctgtgattccatcaatgcatgggttaaaaatgaaaccagggatatgattgacaatctgctgtccccagatcttattgatggtgtgctcaccagactggtcctcgtcaacgcagtgtatttcaagggtctgtggaaatcacggttccaacccgagaacacaaagaaacgcactttcgtggcagccgacgggaaatcctatcaagtgccaatgctggcccagctctccgtgttccggtgtgggtcgacaagtgcccccaatgatttatggtacaacttcattgaactgccctaccacggggaaagcatcagcatgctgattgcactgccgactgagagctccactccgctgtctgccatcatcccacacatcagcaccaagaccatagacagctggatgagcatcatggtgcccaagagggtgcaggtgatcctgcccaagttcacagctgtagcacaaacagatttgaaggagccgctgaaagttcttggcattactgacatgtttgattcatcaaaggcaaattttgcaaaaataacaacagggtcagaaaacctccatgtttctcatatcttgcaaaaagcaaaaattgaagtcagtgaagatggaaccaaagcttcagcagcaacaactgcaattctcattgcaagatcatcgcctccctggtttatagtagacagaccttttctgtttttcatccgacataatcctacaggtgctgtgttattcatggggcagataaacaaaccctgaagagtatacaaaagaaaccatgcaaagcaacgactactttgctacgaagaaagactcctttcctgcatctttcatagttctgttaaatatttttgtacatcgcttctttttcaaaactagttcttaggaacagactcgatgcaagtgtttctgttctgggaggtattggagggaaaaaacagcaggatggctggaacactgtactgaggaatgaatagaaaggcttccagatgtctaaaagattctttaaactactgaactgttacctaggttaacaaccctgttgagtatttgctgtttgtccagttcaggaatttttgttttgttttgtctatatgtgcggcttttcagaagaaatttaatcagtgtgacagaaaaaaaaaatgttttatggtagcttttactttttatgaaaaaaaaattatttgccttttaaattcttttcccccatccccctccaaagtcttgatagcaagcgttattttgggggtagaaacggtgaaatctctagcctctttgtgtttttgttgttgttgttgttgttgttttatataatgcatgtattcactaaaataaaatttaaaaaactcctgtcttgctagacaaggttgctgttgtgcagtgtgcctgtcactactggtctgtactccttggatttgcatttttgtattttgtacaaagtaaaaataaactgttatgagtagtaaaaaaaaaaaaaaaaaa

SEQ ID NO: 136 - protein, 398 aa, Homo sapiens
MNWHLPLFLLASVTLPSICSHFNPLSLEELGSNTGIQVFNQIVKSRPHDNIVISPHGIASVLGMLQLGADGRTKKQLAMVMRYGVNGVGKILKKINKAIVSKKNKDIVTVANAVFVKNASEIEVPFVTRNKDVFQCEVRNVNFEDPASACDSINAWVKNETRDMIDNLLSPDLIDGVLTRLVLVNAVYFKGLWKSRFQPENTKKRTFVAADGKSYQVPMLAQLSVFRCGSTSAPNDLWYNFIELPYHGESISMLIALPTESSTPLSAIIPHISTKTIDSWMSIMVPKRVQVILPKFTAVAQTDLKEPLKVLGITDMFDSSKANFAKITTGSENLHVSHILQKAKIEVSEDGTKASAATTAILIARSSPPWFIVDRPFLFFIRHNPTGAVLFMGQINKP

SEQ ID NO: 137 - DNA, 4963 bp, Homo sapiens
cattgaccaactcaagtcatctttaaacaaattggaaactgagggaaccttgagaatttgtgctgttatgggatgcataatgacagaagcattagagaataaaagtgtacattttcccctaagaagtaaatacaacaggcttacaaaagttgctcgctttctccaagaaaatccttcatgtttactatgtaatatactacaccactatctgcaccaggcaaattactccatcattgatgatgctacaatgagcgatggacttcctgctttggtaactttgaagaaaggtttagttgcactggcaaggcagtggatgaagtttattgtggtgacaccagcctttaaaggagttagcttacatagaccagctcagcctctgaaacctcaaatagctatggaccatgaacatgaagatggacttggattggacaatgggggtggtcttcaaagtgataccagtgctgatggagcagaatttgagttcgatgcagccacagtcagtgaacacacaatgctattagaaggaacagctaaccggcctccacctggtagctctggacctgtaactggagctgagataatgaggaaactttctaaaactcatacccatagtgactctgcattaaaaataaagggcattcacccatatcattctctgagctataccagtggagacactgccactgattctccagtgcatgttggacgtgctgggatgccagtaaaggacagtccaaggaaggagagcctactcagctacctgactggaagcttcccaagcctgcacaacctcctggaaggtactcctcagagaagcagtgctgctgtgaaaagtagctccctaacgagaacaggaaatacagtagccactgatatgttatctgaacatcccttgctatctgagccatcatctgtgagtttctataattggatgtcaaatgctgtgggtaatcgaggaagtgtgttacaagaatctcctgttacaaaatcaggacacaatagtcttcccacaggtgttgcacccaatcttccaacaataccctcagcctcagatttcaacactgtcttgtctagtgaccaaaatactttggatgggacacattctcagcatagcaccagtcaggatgatgtggcaggtgtagaagaagcaaaccaagggtttcctgctgttcagcttgctgatgcacaggttgttttcaagcctcttctgagtcatacagggatccagtcacaggatacaatgccattctgctaccgaatgtactttggagaacacctttcattttcagggactttggactgcctcagagcagatattgtggattcagacacagccaaagagagaaaaggcaaaagagcaagaaggcaaggccatgtgaatcttcctccacttgagttcaaaccagcattaatgttgggaacctttagcatcagtgctgttgtaatggaaaagtccgtgtgcacccctcagaactctaccagtgccctttcttttcatgatctcagcaagcggtattataacacctttcactgcaactttactatttcctgtcagtcaataagccagcatgtagacatggctttggttcgtcttattcatcagtttagcacaatgatagatgacatcaaagcaactcagactgatattaaacttagcagatatacagccggatctgcttccccaacacctaccttcaaaaccagaaaacatcgggactttcgttcatctgactttagccgcagttctagaggaagtcttaatggtggcaatagagtaaataatgcaaagaacaaacggaccaacaatgagaataacaaaaaggaatctcgaaacaagaattcattaggaagatctgaaagaagaacatcaaaagtgtctaggaaaggttcaaaagatgtggtggatcacatgactattcatatggatgactctgattcaattacagtgtcagaacaaagtgagccttcagctgagtgctggcagaatatgtataaattgcttaacttctattcacttatctccgatccaacaggaatattggaaaagtcttcagaaacatttggaccagcaggagttcggagccctacagagccaacatgtaaagttgtgtttgagaatgaacaagacaacagcagtttgactaagactcagaggaaacgtagcttggtaacttctgaacctcagcatgttactctaatagtgtttgggattggcatggtgaaccgcacacacctagaggcagatattggtggactaacaatggaatcagaactgaagaggatccatggcagttttactcttaaggaaaaaatgaaagatgttttacatcaaaagatgactgagacttgtgctactgctcatattggtggggttaatattgtgctgcttgaagggattacaccaaatatacaactggaggattttcctacatctcctacaagtacagccaaacaagagtttctaactgtagtgaaatgtagtattgccaagtcccaagccctctacagtgcccaaagagggctgaagacaaacaatgctgctgtgttcaaagtaggagctatcagtatcaacattcctcagcaccctgccaccttacatagcatgatggttcgaagttctcaccaactatctaaacaaatctcagacctaatcagacagccttctacagccccacagcctgtaaaagaagatattgcaaccccactaccttctgaaaaaaccccaacaagtgttaatcaaactcctgttgaaacaaatgaatttcctcagctaccagaaggcttagaaaagaagcctattgttcttaaattcagtgccatgttagatggtatagccattggagcagcacttttaccatctctgaaagcagaatacaagatgggaagaatgagaagtcatggaatgacaggtgcacagacaagatttacatttgagctgccaaatcacagattgcgttttacttcaaaagtttctgccacagatatgtcaaccattcctccttctgccagtcttaaccttccccctgttaccatgtcagggaaatatataatggaagaacatgatagttattcggatcaggtgtggagtatagatgaactgccttctaaacaaggttactatttacagggaaattatctgcgttgtgtggcagaagttggttcctttgaacataatcttacaactgatcttctaaaccacttggtatttgtacagaaagtgttcatgaaggaagttaatgaagtaatacaaaaagtttctggtggggagcagcctattcctctctggaacgaacatgatggaacagcagatggagataaacctaaaattctcctctattccctaaacttgcagttcaagggtattcaagtaacggccactactccatcaatgagagctgtaagatttgaaactggattgattgaactggaactttctaaccgacttcaaaccaaagcttcaccaggaagtagcagctatctgaaactgtttggcaaatgccaggtggatttaaatctggcattaggacaaattgtcaaacatcaggtttatgaggaagctggttctgattttcatcaagttgcctattttaaaaccagaattggattaagaaatgccctccgagaagaaatcagtggttcttcagatagggaagctgtgcttattactttgaatagaccaattgtttatgcacagcctgtggcctttgatagagctgtgctgttttggctgaattataaggctgcctatgacaactggaatgaacaacgaatggctttacataaggatattcatatggctacaaaggaagtagtagatatgctacctggtatccagcaaacatcagcccaggcctttgggactctttttctccagctcactgtcaatgatctgggaatttgcctacctatcacaaatactgcacagtctaatcatactggagaccttgacactggttctgctttggtattaaccattgaaagtactctcatcactgcatgctcttcagagtctctggttagcaaagggcatttcaaaaacttttgtatccgttttgctgatggatttgagacatcatgggatgactggaaaccagaaattcatggggatttagtgatgaatgcctgtgtagttccagatggcacctatgaagtatgttcaagaactacaggacaagcagcagctgaaagcagtagtgctggaacctggacactcaacgtattgtggaaaatgtgtgggattgatgttcacatggatcctaacattggcaaaaggcttaatgctctgggcaatactcttacaacactgacaggagaggaagacatagatgacattgctgacttaaattcagtgaacatagctgacctgtcagatgaggatgaagttgatactatgtctcccactatccatactgaagccacagattatcgaagacaggcagcatctgctagccagccgggagaacttagaggaagaaaaattatgaagcgtatagtggatatcagagaactgaatgaacaggccaaagtaatagatgatctgaaaaaattaggtgcaagtgaaggaaccataaaccaggaaattcaacgttaccaacagttagaatctgtggctgtgaatgacattagaagagatgttcgtaaaaaattacggaggtccagtatgcgggctgcttccctaaaggataagtggggtttgagttacaaaccaagttacagccgatcaaaaagcatttctgcttctggaagaccacctcttaagcgaatggaaagggcaagttctcgagtaggagaaactgaagagctcccagaaatccgtgtggatgcagcatctcctggacctagagtaacttttaatatccaggatacaatagcagaaattagaaggaagaagatcagcttcaaagttgtattctaatttcatagcatattaaacattatattaaaatgttaaaaaaaaaaaaaa

SEQ ID NO: 138 - protein, 1637 aa, Homo sapiens
IDQLKSSLNKLETEGTLRICAVMGCIMTEALENKSVHFPLRSKYNRLTKVARFLQENPSCLLCNILHHYLHQANYSIIDDATMSDGLPALVTLKKGLVALARQWMKFIVVTPAFKGVSLHRPAQPLKPQIAMDHEHEDGLGLDNGGGLQSDTSADGAEFEFDAATVSEHTMLLEGTANRPPPGSSGPVTGAEIMRKLSKTHTHSDSALKIKGIHPYHSLSYTSGDTATDSPVHVGRAGMPVKDSPRKESLLSYLTGSFPSLHNLLEGTPQRSSAAVKSSSLTRTGNTVATDMLSEHPLLSEPSSVSFYNWMSNAVGNRGSVLQESPVTKSGHNSLPTGVAPNLPTIPSASDFNTVLSSDQNTLDGTHSQHSTSQDDVAGVEEANQGFPAVQLADAQVVFKPLLSHTGIQSQDTMPFCYRMYFGEHLSFSGTLDCLRADIVDSDTAKERKGKRARRQGHVNLPPLEFKPALMLGTFSISAVVMEKSVCTPQNSTSALSFHDLSKRYYNTFHCNFTISCQSISQHVDMALVRLIHQFSTMIDDIKATQTDIKLSRYTAGSASPTPTFKTRKHRDFRSSDFSRSSRGSLNGGNRVNNAKNKRTNNENNKKESRNKNSLGRSERRTSKVSRKGSKDVVDHMTIHMDDSDSITVSEQSEPSAECWQNMYKLLNFYSLISDPTGILEKSSETFGPAGVRSPTEPTCKVVFENEQDNSSLTKTQRKRSLVTSEPQHVTLIVFGIGMVNRTHLEADIGGLTMESELKRIHGSFTLKEKMKDVLHQKMTETCATAHIGGVNIVLLEGITPNIQLEDFPTSPTSTAKQEFLTVVKCSIAKSQALYSAQRGLKTNNAAVFKVGAISINIPQHPATLHSMMVRSSHQLSKQISDLIRQPSTAPQPVKEDIATPLPSEKTPTSVNQTPVETNEFPQLPEGLEKKPIVLKFSAMLDGIAIGAALLPSLKAEYKMGRMRSHGMTGAQTRFTFELPNHRLRFTSKVSATDMSTIPPSASLNLPPVTMSGKYIMEEHDSYSDQVWSIDELPSKQGYYLQGNYLRCVAEVGSFEHNLTTDLLNHLVFVQKVFMKEVNEVIQKVSGGEQPIPLWNEHDGTADGDKPKILLYSLNLQFKGIQVTATTPSMRAVRFETGLIELELSNRLQTKASPGSSSYLKLFGKCQVDLNLALGQIVKHQVYEEAGSDFHQVAYFKTRIGLRNALREEISGSSDREAVLITLNRPIVYAQPVAFDRAVLFWLNYKAAYDNWNEQRMALHKDIHMATKEVVDMLPGIQQTSAQAFGTLFLQLTVNDLGICLPITNTAQSNHTGDLDTGSALVLTIESTLITACSSESLVSKGHFKNFCIRFADGFETSWDDWKPEIHGDLVMNACVVPDGTYEVCSRTTGQAAAESSSAGTWTLNVLWKMCGIDVHMDPNIGKRLNALGNTLTTLTGEEDIDDIADLNSVNIADLSDEDEVDTMSPTIHTEATDYRRQAASASQPGELRGRKIMKRIVDIRELNEQAKVIDDLKKLGASEGTINQEIQRYQQLESVAVNDIRRDVRKKLRRSSMRAASLKDKWGLSYKPSYSRSKSISASGRPPLKRMERASSRVGETEELPEIRVDAASPGPRVTFNIQDTIAEIRRKKISFKVVF

SEQ ID NO: 139 - DNA, 2253 bp, Homo sapiens
gtgcagcggcggccgcttggaagatggctgcgccctgtggctcggagctgcccgccaactcgccgctaaaaattccgaagatggaggtgctttccccggcttctcctggtggcctgagcgacggaaatccatcgctgtccgacccttccacgcctcggggtgcctccccgctcgggccgggcagtgcggcgggctcgggggcagcggcgtccgggggtctcgggctggggctggggggccgcagcgccgcctcgtcctcggtctccttctcccctggtggcggcggtggcggggctgcggcagccgccgccgccgcctgccggggcatgtcgtggacgccagccgagacgaacgcgctcatcgcagtgtggggcaacgagcggctggtggaggcgcggtaccagcagctggagggagccggcacggtgttcggcagcaaggcccccgggccagccatgtacgagcgcgtgtcccgggccctggccgagctgggctacgagcggaccccgtcccagtgccgggagcgcatcaaggagctggagtcagatggcagcactatggaggactattcacaggaggactggggaaaccacagtcaggatctccatggctatccaacagatcaggaattggatgaaatacctgtcacaaagagaacattaaaaataaaacaagagtcttctgaagaagcacagaagagagacatcatgcagaatattgtacagattttggaatcggtacagttgaaatgggaactttttcagagctggacagacttttcaaggctccatctttctaataaactggccatttttggaattggttataacacccgttggaaagaggatatccgttaccattatgctgagatcagctcccaggtgccccttggcaagcgacttcgggagtacttcaactctgagaagcctgaaggacggatcattatgacccgagtgcagaaaatgaactggaaagatgtttactacaaatttttagagatcactattagcaaagctaggtgcttggagctgcacatggaaattgactggatacccattgcccactccaaaccaactggtgggaatgttgttcaatatttattgcctgggggtattcctaaaagcccaggcctttatgccattggctatgaagaatgtattgagaggcccctctcaccacacatggagcaaagttccctggacccaggaaaagagggccgggttgacctggaaaccctttcagcacaagcctcattacaggtggaaatagaacccacccgaattatctattgctacctcgggattgctgaggtcaggactctacagcagtgcttatttttacatttccaagcgaataccaaaaccttcagcaaagattgggttggtattaacgggtttttgtctcagaactgtattgtggatcccggagtttcccccaaatccatctacatcaaatttgtagaagtagagagggattttctttccgcaggctctttagttgagtgcctggaaaaagccattggataccccttaaaatttaacaactgaatgtcatccttcataaggatttgggctcttagctccttcttctctactcacttcccattacccggaccacccctcatccagatgccgccgtcagactcttcatggaaaccctttcttcaattgggccagtacgacttctaaggaatcatagtagacttgggccagaaaaaacagacctcacctgaaaatgctcattttgagcaagcaagatatatagcgaacttgcatggtgggtcagctatttcttttttaaaaacagaaaaacaatttttaaatggattttagagccctaatataaacaaatgtaggtacattccatattggacaaaacttatactttgagtttcatatgaaattgaaaaattgtatttttttcacaatgtttcatttttacacatctctatgtctctatataagtaatatttacaaccctgaataaataagcaatagataatggcaagttaaatcttgattcacagttaaaaagactttttcaatatcacccttagctactattgtatataatttagattttcatttttttcaccagccaagtgttttgctatttccaatcagtattgcttgcagagacctttgtttctgtgatgtaccaactttacagttgtgttgccatttaaacctttttttaaaaaaaaaaaaattaaagtaattcctggccaaaaaaaaaaaaaaaaaaaaaaaaaaa

SEQ ID NO: 140 - protein, 507 aa, Homo sapiens
MAAPCGSELPANSPLKIPKMEVLSPASPGGLSDGNPSLSDPSTPRGASPLGPGSAAGSGAAASGGLGLGLGGRSAASSSVSFSPGGGGGGAAAAAAAACRGMSWTPAETNALIAVWGNERLVEARYQQLEGAGTVFGSKAPGPAMYERVSRALAELGYERTPSQCRERIKELESDGSTMEDYSQEDWGNHSQDLHGYPTDQELDEIPVTKRTLKIKQESSEEAQKRDIMQNIVQILESVQLKWELFQSWTDFSRLHLSNKLAIFGIGYNTRWKEDIRYHYAEISSQVPLGKRLREYFNSEKPEGRIIMTRVQKMNWKDVYYKFLEITISKARCLELHMEIDWIPIAHSKPTGGNVVQYLLPGGIPKSPGLYAIGYEECIERPLSPHMEQSSLDPGKEGRVDLETLSAQASLQVEIEPTRIIYCYLGIAEVRTLQQCLFLHFQANTKTFSKDWVGINGFLSQNCIVDPGVSPKSIYIKFVEVERDFLSAGSLVECLEKAIGYPLKFNN

SEQ ID NO: 141 - DNA, 4146 bp, Homo sapiens
cggtccgttgttcatttgccattcgacctccgccagggcctggtcggacggaaacgctccgccggctttattgtcgcttcgttatgtggcggagccgagcagtttagcgtgcctctcaccctcagcgcctgcgaagccggcggcggcgtcgggactcctcggcgcgcggaggaaggatatctgtgtggaggatcggtgtgtgcgcgcgcggctttaaagagggggcagcggagggtctccccgcactccgctgctcaacttcgaaggcctcgctcgctgcaggctcgctcctcacctctccgccgcccgcccccttctccgcgcgggacgctgcccggagcgcggcggggcgggggtggaggacgagagagcggtcggaggcgtcggcccggcagcggcagcggcagcggacgcgtgcagcagacccgggagcgagcgcgagccgggctgccgggcgagagggcgaggccgagccccgcgagaccggaacgccgggggcgggggcgagacagagggggagccgcggggagcgcgcgggacgcggcccgaggccgtgcgcgagccggggcaccgggcggcggcggcggcggcgcgcgccatgtcgttcagtgaaatgaaccgcaggacgctggcgttccgaggaggcgggttggtcaccgctagcggcggcggctccacgaacaataacgctggcggggaggcctcagcttggcctccgcagccccagccgagacagcccccgccgacagcgccgcccgcgcttcagccgcctaatgggcggggggccgacgaggaagtggaattggagggcctggagccccaagacctggaggcctccgccgggccggccgccggcgccgccgaggaagccaaggagttgctgctcccccaagacgcgggcggccccacctcgcttggcggtggcgcggggggccccctgctagcggaaaggaaccgtcggactctggccttccgaggcggcggcggcgggggtctcggcaacaatggcagtagccgcggccgccccgagacctcggtgtggcccttgaggcatttcaatgggcgagggccggcgactgtggatctggagctggacgcgctggaggggaaggagttgatacaggacggcgcgtccctgagcgacagcaccgaggacgaggaggagggggcgagcctgggcgacggcagcggggcggaaggcggcagctgcagcagcagcaggcggtcgggcggcgatggcggggacgaagtggagggcagcggtgtgggagctggcgaaggagagactgtccagcacttcccgctcgcgcggcccaagtctctaatgcagaagctccaatgctccttccagacctcctggctcaaggactttccctggctgcgctattccaaggatactggtcttatgtcttgcggctggtgccaaaagacccctgcagatgggggaagcgtggaccttcccccagtggggcatgatgagctttcgcgagggacccgcaactacaagaaaaccctcctcctgaggcaccacgtctctaccgagcacaaactccacgaagccaacgccccagagtcagaaataccatcagaggaggggtactgggactttaataggaggccaaatgagaactcttattgctatcaacttctgcgacaactaaatgaacagagaaagaaaggtattctttgtgatgtcagcattgtggtaagcggaaaaatcttcaaagctcataagaacatcctggttgcaggcagccgtttctttaagactttatattgcttttcaaacaaagaaagccctaaccaaaacaatactacccacttagatattgctgcagttcaaggtttttcagtcatcttggacttcttgtattctggtaacctggtgctcacaagccaaaatgccattgaagttatgaccgtggccagctatcttcaaatgagtgaagttgttcaaacttgccgaaatttcattaaagatgccttaaatataagcattaaatcagaagctccagagtctgtagttgtggactataataatagaaaaccagttaatagagatggtctgtcttcatcacgggatcaaaaaattgccagtttttgggcaacacggaatcttaccaatttggcaagtaatgtaaagattgaaaatgatggttgtaatgtcgacgagggccaaatagaaaactaccaaatgaatgacagtagttgggtccaggatggatctcctgaaatggctgaaaatgaatctgaaggtcaaacaaaagtgtttatttggaataatatgggctcccagggaattcaagagactggcaaaacaaggaggaaaaaccaaactacaaaaagatttatttataatattccacctaataatgaaacgaatttagaagattgctcagtaatgcagccacctgttgcctatccagaagaaaatacactactcatcaaggaagaaccagatttagatggtgctctactctcggggccagatggtgataggaatgtgaatgcaaatttattggctgaagctggcactagtcaagatggaggtgatgctggtacttcacatgatttcaagtatggtttgatgcctggtccttcaaatgatttcaagtatggattattgccagaatcttggccaaaacaagaaacctgggaaaatggtgaatcatctctaatcatgaacaagttaaaatgccctcattgtagctatgtagccaaatacagacgaacactaaaaaggcacttgctcattcacacaggagtgagatcatttagctgtgatatttgtggaaaactgtttactcgaagagaacatgtaaaaagacattccctggtgcataaaaaggataaaaaatacaaatgtatggtgtgtaagaagatcttcatgttagcagccagtgttggaataagacatggatctcgacgttatggtgtttgtgtagactgtgcagataaatcacagccaggagggcaagaaggtgtagatcagggacaggatacagaattccctcgggatgaagaatacgaggagaatgaagtaggagaagctgatgaagagctagttgatgatggagaagatcagaatgatccctctcgatgggatgaatcaggagaagtttgtatgtctctagatgattaactgacctactatactcctcaaggatgctgcatttggacctaatatgaatcgacaatttggattgttgaacttgaaggcttgcaaaatatggtacatgctggatagtagttatgttgctgtgaaaactgtagggtcaaagccttatagcaaaaaaaatttttttttatatttgcacaggactatacagcaaacaaccatgtggttggattacatggagtccccacatactcagtcagttatcaaagtaaaatattttttatttataggatatacagtaactatttgggtcctatgaaaatagtccttaaagagcttacattcatgtgctactttaacatgaatggagaaaatccgtttatggaagtacagtgacaattgacccaatcactctgtccatcaaaccactcaggctagtttgtactagtagagttttgtttctatttttatttttattaattttattttttttaatacagattttcagtgaggggctttttcaatcccattggttctattttcttgtatttttccatttaatttgcttcataacttaaaccaagtctcttctagtcttaggtattatttctcgattttgtgctgatgggcatgtttataagaactggagaggtaatttattggaatgaactaactgacttcctccattcccctcttcctttttgacatgaattttactacttcacaaatgaagaatgatgttatgaagttagcttggcggagttgacaaataccactaaaatgattatgatttagaagtaactttcttctgctgctctaatctgataaatggttactatatgatattttctgacatggtatttggttttgggtatctgttactttggcactattcttgtttgcctctttatttttgccagtgtactatacctcagtcctatttgaaagacctaattgaaagaaaaatcatagaaataagtaaaatgatttgttttataatttatccaccatgtccagtttggttagct

SEQ ID NO: 142 - protein, 847 aa, Homo sapiens
MSFSEMNRRTLAFRGGGLVTASGGGSTNNNAGGEASAWPPQPQPRQPPPTAPPALQPPNGRGADEEVELEGLEPQDLEASAGPAAGAAEEAKELLLPQDAGGPTSLGGGAGGPLLAERNRRTLAFRGGGGGGLGNNGSSRGRPETSVWPLRHFNGRGPATVDLELDALEGKELIQDGASLSDSTEDEEEGASLGDGSGAEGGSCSSSRRSGGDGGDEVEGSGVGAGEGETVQHFPLARPKSLMQKLQCSFQTSWLKDFPWLRYSKDTGLMSCGWCQKTPADGGSVDLPPVGHDELSRGTRNYKKTLLLRHHVSTEHKLHEANAPESEIPSEEGYWDFNRRPNENSYCYQLLRQLNEQRKKGILCDVSIVVSGKIFKAHKNILVAGSRFFKTLYCFSNKESPNQNNTTHLDIAAVQGFSVILDFLYSGNLVLTSQNAIEVMTVASYLQMSEVVQTCRNFIKDALNISIKSEAPESVVVDYNNRKPVNRDGLSSSRDQKIASFWATRNLTNLASNVKIENDGCNVDEGQIENYQMNDSSWVQDGSPEMAENESEGQTKVFIWNNMGSQGIQETGKTRRKNQTTKRFIYNIPPNNETNLEDCSVMQPPVAYPEENTLLIKEEPDLDGALLSGPDGDRNVNANLLAEAGTSQDGGDAGTSHDFKYGLMPGPSNDFKYGLLPESWPKQETWENGESSLIMNKLKCPHCSYVAKYRRTLKRHLLIHTGVRSFSCDICGKLFTRREHVKRHSLVHKKDKKYKCMVCKKIFMLAASVGIRHGSRRYGVCVDCADKSQPGGQEGVDQGQDTEFPRDEEYEENEVGEADEELVDDGEDQNDPSRWDESGEVCMSLDD

SEQ ID NO: 143 - DNA, 2399 bp, Homo sapiens
agcggagggggccagcggctggcgaagaaggaaagagggtactctctggctgggctggggccgtagcgacgtccgccgcgaacctgggccccccaaagctgcggggcgttcggtgtcgccgaagtaaacatgcaccctgagccctcggagcctgcgacaggtggtgcagcagagctggattgcgcgcaggagcccggcgtggaggagtctgcgggtgaccacgggagcgcaggccgagggggctgcaaggaagaaattaatgatcctaaggaaatatgtgtgggttcttctgacacatcctaccacagccagcagaaacagagtggtgataatgggtcaggtggtcacttcgcacacccaagagaagacagggaagatcggggccccagaatgactaaaagttccctgcaaaaactctgcaagcagcacaagctttatattaccccagcattgaatgatacgctgtatttacactttaaaggttttgatcgcattgagaacctggaagagtacacagggctgcgctgtctctggctgcagagcaatggaatacagaaaatcgaaaacctggaggcccaaactgagttgcgttgcctcttcttgcaaatgaacttgctccgtaaaattgagaacctggaacctctgcagaaactggatgctcttaacctcagcaacaattacatcaagaccattgaaaacctctcctgcctcccagtcctgaacacattgcagatggcccacaatcacctggagaccgtggaggacattcagcatctacaagagtgtttgaggctttgtgtccttgacctttcgcacaacaagctgagtgacccggagatcctgagcattctggaaagcatgcccgatttgcgtgtactgaatttgatgggaaacccggttatcagacagattcctaattacagaaggacagtcactgtacgactaaagcacttaacatacctggatgatagaccagtgtttccaaaggacagagcttgtgcggaggcctgggctaggggagggtacgcagctgaaaaggaggagagacagcagtgggagagcagggagcggaagaagatcacagacagcattgaagccttggccatgatcaagcagcgggcagaggagaggaaaagacagagagagagtcaagagagaggggagatgacatcttcagatgatggtgagaatgtgcccgccagtgcggaaggcaaggaggagcctcccggggacagagaaacaaggcagaagatggagctatttgttaaggaaagctttgaggccaaggacgagctctgcccggaaaggccaagtggagaggagccgcctgtggaggctaaaagagaggatggaggtccagagccagaggggaccctcccagctgagaccctgctactgtcgtcacctgtggaggttaaaggagaggacggagatggagagccagaggggaccctcccagctgaggccccaccacccccgccacctgtggaggttaaaggagaggatggagatcaagagccagaggggaccctcccagctgagaccctgctactgtcaccgcctgtgaaggttaaaggagaggatggagatcgagagccagaggggaccctcccagctgaggccccaccaccactgcccctgggagctgccagggaagaaccgactccccaggctgtggccactgagggtgtattcgttacagaacttgatggaacgagaacggaagatttagaaaccattagactggagacaaaggagacatgctgcattgatgacctacctgacttggaagatgatgatgaaacaggcaaatctctggaagaccagaatatgtgctttccgaagattgaggtcatctcgagcttgagtgatgacagtgaccctgaactggactacacgtcactccctgtgctggaaaacctgcccacagacactctgtcaaatatatttgcagtctctaaagacacctcaaaggcggctcgggtgcccttcacagacatctttaaaaaagaagctaagagggactcggaaatccgaaaacaagacaccaagtccccaagacccctgatccaggagctcagcgacgaggacccctctggccagccactgatgccccccacctgccaaagagatgctgcaccactcacttccactggagacagggacagcgacttccttgcagcctcttctccggtgccgactgagagcgccgccacacccccagagacgtgtgtcggagttgcccagcccagccaagctctgcccacgtgggacctcactgcattcccagcaccgaaagcatcatagttttccccagttatatgtagcataaatggtttaattataaatgtctcccttaggcatgataaacattttaacacccaaaaaaaaaaaaaaaa

SEQ ID NO: 144 - protein, 524 aa, Homo sapiens
MAHNHLETVEDIQHLQECLRLCVLDLSHNKLSDPEILSILESMPDLRVLNLMGNPVIRQIPNYRRTVTVRLKHLTYLDDRPVFPKDRACAEAWARGGYAAEKEERQQWESRERKKITDSIEALAMIKQRAEERKRQRESQERGEMTSSDDGENVPASAEGKEEPPGDRETRQKMELFVKESFEAKDELCPERPSGEEPPVEAKREDGGPEPEGTLPAETLLLSSPVEVKGEDGDGEPEGTLPAEAPPPPPPVEVKGEDGDQEPEGTLPAETLLLSPPVKVKGEDGDREPEGTLPAEAPPPLPLGAAREEPTPQAVATEGVFVTELDGTRTEDLETIRLETKETCCIDDLPDLEDDDETGKSLEDQNMCFPKIEVISSLSDDSDPELDYTSLPVLENLPTDTLSNIFAVSKDTSKAARVPFTDIFKKEAKRDSEIRKQDTKSPRPLIQELSDEDPSGQPLMPPTCQRDAAPLTSTGDRDSDFLAASSPVPTESAATPPETCVGVAQPSQALPTWDLTAFPAPKAS

SEQ ID NO: 145 - DNA, 1216 bp, Homo sapiens
ttcggcacttgggagaagatgtttgaaaaaactgactctgctaatgagcctggactcagagctcaagtctgaactctacctccagacagaatgaagttcatctcgacatctctgcttctcatgctgctggtcagcagcctctctccagtccaaggtgttctggaggtctattacacaagcttgaggtgtagatgtgtccaagagagctcagtctttatccctagacgcttcattgatcgaattcaaatcttgccccgtgggaatggttgtccaagaaaagaaatcatagtctggaagaagaacaagtcaattgtgtgtgtggaccctcaagctgaatggatacaaagaatgatggaagtattgagaaaaagaagttcttcaactctaccagttccagtgtttaagagaaagattccctgatgctgatatttccactaagaacacctgcattcttcccttatccctgctctggattttagttttgtgcttagttaaatcttttccagggagaaagaacttccccatacaaataaggcatgaggactatgtgaaaaataaccttgcaggagctgatggggcaaactcaagcttcttcactcacagcaccctatatacacttggagtttgcattcttattcatcagggaggaaagtttctttgaaaatagttattcagttataagtaatacaggattattttgattatatacttgttgtttaatgtttaaaatttcttagaaaacaatggaatgagaatttaagcctcaaatttgaacatgtggcttgaattaagaagaaaattatggcatatattaaaagcaggcttctatgaaagactcaaaaagctgcctgggaggcagatggaacttgagcctgtcaagaggcaaaggaatccatgtagtagatatcctctgcttaaaaactcactacggaggagaattaagtcctacttttaaagaatttctttataaaatttactgtctaagattaatagcattcgaagatccccagacttcatagaatactcagggaaagcatttaaagggtgatgtacacatgtatcctttcacacatttgccttgacaaacttctttcactcacatctttttcactgactttttttgtgggggcggggccggggggactctggtatctaattctttaatgattcctataaatctaatgacattcaataaagttgagcaaacattttactt

SEQ ID NO: 146 - protein, 109 aa, Homo sapiens
MKFISTSLLLMLLVSSLSPVQGVLEVYYTSLRCRCVQESSVFIPRRFIDRIQILPRGNGCPRKEIIVWKKNKSIVCVDPQAEWIQRMMEVLRKRSSSTLPVPVFKRKIP

SEQ ID NO: 147 - DNA, 1449 bp, Homo sapiens
ctggatagaacagctcaagccttgccacttcgggcttctcactgcagctgggcttggacttcggagttttgccattgccagtgggacgtctgagactttctccttcaagtacttggcagatcactctcttagcagggtctgcgcttcgcagccgggatgaagctggtttccgtcgccctgatgtacctgggttcgctcgccttcctaggcgctgacaccgctcggttggatgtcgcgtcggagtttcgaaagaagtggaataagtgggctctgagtcgtgggaagagggaactgcggatgtccagcagctaccccaccgggctcgctgacgtgaaggccgggcctgcccagacccttattcggccccaggacatgaagggtgcctctcgaagccccgaagacagcagtccggatgccgcccgcatccgagtcaagcgctaccgccagagcatgaacaacttccagggcctccggagctttggctgccgcttcgggacgtgcacggtgcagaagctggcacaccagatctaccagttcacagataaggacaaggacaacgtcgcccccaggagcaagatcagcccccagggctacggccgccggcgccggcgctccctgcccgaggccggcccgggtcggactctggtgtcttctaagccacaagcacacggggctccagcccccccgagtggaagtgctccccactttctttaggatttaggcgcccatggtacaaggaatagtcgcgcaagcatcccgctggtgcctcccgggacgaaggacttcccgagcggtgtggggaccgggctctgacagccctgcggagaccctgagtccgggaggcaccgtccggcggcgagctctggctttgcaagggcccctccttctgggggcttcgcttccttagccttgctcaggtgcaagtgccccagggggcggggtgcagaagaatccgagtgtttgccaggcttaaggagaggagaaactgagaaatgaatgctgagacccccggagcaggggtctgagccacagccgtgctcgcccacaaactgatttctcacggcgtgtcaccccaccagggcgcaagcctcactattacttgaactttccaaaacctaaagaggaaaagtgcaatgcgtgttgtacatacagaggtaactatcaatatttaagtttgttgctgtcaagattttttttgtaacttcaaatatagagatatttttgtacgttatatattgtattaagggcattttaaaagcaattatattgtcctcccctattttaagacgtgaatgtctcagcgaggtgtaaagttgttcgccgcgtggaatgtgagtgtgtttgtgtgcatgaaagagaaagactgattacctcctgtgtggaagaaggaaacaccgagtctctgtataatctatttacataaaatgggtgatatgcgaacagcaaacc

SEQ ID NO: 148 - protein, 185 aa, Homo sapiens
MKLVSVALMYLGSLAFLGADTARLDVASEFRKKWNKWALSRGKRELRMSSSYPTGLADVKAGPAQTLIRPQDMKGASRSPEDSSPDAARIRVKRYRQSMNNFQGLRSFGCRFGTCTVQKLAHQIYQFTDKDKDNVAPRSKISPQGYGRRRRRSLPEAGPGRTLVSSKPQAHGAPAPPSGSAPHFL

SEQ ID NO: 149 - DNA, 1219 bp, Homo sapiens
gggagcgggcgagtaggagggggcgccgggctatatatatagcggcctcggcctcgggcgggcctggcgctcagggaggcgcgcactgctcctcagagtcccagctccagccgcgcgctttccgcccggctcgccgctccatgcagccggggtagagcccggcgcccgggggccccgtcgcttgcctcccgcacctcctcggttgcgcactcccgcccgaggtcggccgtgcgctcccgcgggacgccacaggcgcagctctgccccccagcttcccgggcgcactgaccgcctgaccgacgcacgccctcgggccgggatgtcggggcccgggacggccgcggtagcgctgctcccggcggtcctgctggccttgctggcgccctgggcgggccgagggggcgccgccgcacccactgcacccaacggcacgctggaggccgagctggagcgccgctgggagagcctggtggcgctctcgttggcgcgcctgccggtggcagcgcagcccaaggaggcggccgtccagagcggcgccggcgactacctgctgggcatcaagcggctgcggcggctctactgcaacgtgggcatcggcttccacctccaggcgctccccgacggccgcatcggcggcgcgcacgcggacacccgcgacagcctgctggagctctcgcccgtggagcggggcgtggtgagcatcttcggcgtggccagccggttcttcgtggccatgagcagcaagggcaagctctatggctcgcccttcttcaccgatgagtgcacgttcaaggagattctccttcccaacaactacaacgcctacgagtcctacaagtaccccggcatgttcatcgccctgagcaagaatgggaagaccaagaaggggaaccgagtgtcgcccaccatgaaggtcacccacttcctccccaggctgtgaccctccagaggacccttgcctcagcctcgggaagcccctgggagggcagtgcgagggtcaccttggtgcactttcttcggatgaagagtttaatgcaagagtaggtgtaagatatttaaattaattatttaaatgtgtatatattgccaccaaattatttatagttctgcgggtgtgttttttaattttctggggggaaaaaaagacaaaacaaaaaaccaactctgacttttctggtgcaacagtggagaatcttaccattggatttctttaacttgt

SEQ ID NO: 150 - protein, 206 aa, Homo sapiens
MSGPGTAAVALLPAVLLALLAPWAGRGGAAAPTAPNGTLEAELERRWESLVALSLARLPVAAQPKEAAVQSGAGDYLLGIKRLRRLYCNVGIGFHLQALPDGRIGGAHADTRDSLLELSPVERGVVSIFGVASRFFVAMSSKGKLYGSPFFTDECTFKEILLPNNYNAYESYKYPGMFIALSKNGKTKKGNRVSPTMKVTHFLPRL

SEQ ID NO: 151 - DNA, 1371 bp, Homo sapiens
ctccttccaagaagagcagcaaagctgaagtagcagcaacagcaccagcagcaacagcaaaaaacaaacatgagtgtgaagggcatggctatagccttggctgtgatattgtgtgctacagttgttcaaggcttccccatgttcaaaagaggacgctgtctttgcataggccctggggtaaaagcagtgaaagtggcagatattgagaaagcctccataatgtacccaagtaacaactgtgacaaaatagaagtgattattaccctgaaagaaaataaaggacaacgatgcctaaatcccaaatcgaagcaagcaaggcttataatcaaaaaagttgaaagaaagaatttttaaaaatatcaaaacatatgaagtcctggaaaagggcatctgaaaaacctagaacaagtttaactgtgactactgaaatgacaagaattctacagtaggaaactgagacttttctatggttttgtgactttcaacttttgtacagttatgtgaaggatgaaaggtgggtgaaaggaccaaaaacagaaatacagtcttcctgaatgaatgacaatcagaattccactgcccaaaggagtccagcaattaaatggatttctaggaaaagctaccttaagaaaggctggttaccatcggagtttacaaagtgctttcacgttcttacttgttgtattatacattcatgcatttctaggctagagaaccttctagatttgatgcttacaactattctgttgtgactatgagaacatttctgtctctagaagttatctgtctgtattgatctttatgctatattactatctgtggttacagtggagacattgacattattactggagtcaagcccttataagtcaaaagcatctatgtgtcgtaaagcattcctcaaacattttttcatgcaaatacacayttctttccccaaatatcatgtagcacatcaatatgtagggaaacattcttatgcatcatttggtttgttttataaccaattcattaaatgtaattcataaaatgtactatgaaaaaaattatacgctatgggatactggcaacagtgcacatatttcataaccaaattagcagcaccggtcttaatttgatgtttttcaacttttattcattgagatgttttgaagcaattaggatatgtgtgtttactgtactttttgttttgatccgtttgtataaatgatagcaatatcttggacacatttgaaatacaaaatgtttttgtctaccaaagaaaaatgttgaaaaataagcaaatgtatacctagcaatcacttttactttttgtaattctgtctcttagaaaaatacataatctaatcaaaaaaaaaaaaaaaaaaaaaa

SEQ ID NO: 152 - protein, 94 aa, Homo sapiens
MSVKGMAIALAVILCATVVQGFPMFKRGRCLCIGPGVKAVKVADIEKASIMYPSNNCDKIEVIITLKENKGQRCLNPKSKQARLIIKKVERKNF

SEQ ID NO: 153 - DNA, 3871 bp, Homo sapiens
gcggattgttgctccgttgtacctgctggggaattcacctcgttactgcttgatatcttccaccccttacaaaatcagaaaagttgtgttttctaataccaaagaggaggtttggctttctgtgggtgattcccagacactgaagtgcaaagaagagaccctcctagaaaagtaaaatatgactaaaagcaatggagaagagcccaagatggggggcaggatggagagattccagcagggagtccgtaaacgcacacttttggccaagaagaaagtgcagaacattacaaaggaggatgttaaaagttacctgtttcggaatgcttttgtgctgctcacagtcaccgctgtcattgtgggtacaatccttggatttaccctccgaccatacagaatgagctaccgggaagtcaagtacttctcctttcctggggaacttctgatgaggatgttacagatgctggtcttaccacttatcatctccagtcttgtcacaggaatggcggcgctagatagtaaggcatcagggaagatgggaatgcgagctgtagtctattatatgactaccaccatcattgctgtggtgattggcataatcattgtcatcatcatccatcctgggaagggcacaaaggaaaacatgcacagagaaggcaaaattgtacgagtgacagctgcagatgccttcctggacttgatcaggaacatgttccctccaaatctggtagaagcctgctttaaacagtttaaaaccaactatgagaagagaagctttaaagtgcccatccaggccaacgaaacgcttgtgggtgctgtgataaacaatgtgtctgaggccatggagactcttacccgaatcacagaggagctggtcccagttccaggatctgtgaatggagtcaatgccctgggtctagttgtcttctccatgtgcttcggttttgtgattggaaacatgaaggaacaggggcaggccctgagagagttctttgattctcttaacgaagccatcatgagactggtagcagtaataatgtggtatgcccccgtgggtattctcttcctgattgctgggaagattgtggagatggaagacatgggtgtgattggggggcagcttgccatgtacaccgtgactgtcattgttggcttactcattcacgcagtcatcgtcttgccactcctctacttcttggtaacacggaaaaacccttgggtttttattggagggttgctgcaagcactcatcaccgctctggggacctcttcaagttctgccaccctacccatcaccttcaagtgcctggaagagaacaatggcgtggacaagcgcgtcaccagattcgtgctccccgtaggagccaccattaacatggatgggactgccctctatgaggctttggctgccattttcattgctcaagttaacaactttgaactgaacttcggacaaattattacaatcagcatcacagccacagctgccagtattggggcagctggaattcctcaggcgggcctggtcactatggtcattgtgctgacatctgtcggcctgcccactgacgacatcacgctcatcatcgcggtggactggttcctggatcgcctccggaccaccaccaacgtactgggagactccctgggagctgggattgtggagcacttgtcacgacatgaactgaagaacagagatgttgaaatgggtaactcagtgattgaagagaatgaaatgaagaaaccatatcaactgattgcacaggacaatgaaactgagaaacccatcgacagtgaaaccaagatgtagactaacataaagaaacactttcttgagcaccaggtgttaaaaaccattataaaatctttccatctcattacagctcattcgctccagcaagcccgtcatcttccctttcctcccttctgataagactggaaaatagtcctccaaaacacaagggaggattttgggtggccaaagtgtacaattttcatcccacaattgaaatttttaaatcatttcatgttagtcttaccgaataaggtaccaagatcacaaatagtgttgatcagatcttacaagtttatgtggcacacaattcctataaatgtgatttttttatataagttaaagagacaaatagtaggctaaaaacattttaaaatcaacttttgaaatttaaaaatctttcagaatacaattcagttttagtttcaaaatgttaacaacttgaattacaaccggttatcagttggacagtaagattttatccctttctcttctgactggtatacctatttcattagtagctaggtgcacatatacatctagcacagctgtgaggacagacagaaggcaaagtttccatgtggccttgagcaagtcccatctcacctctaggcctcagtgtcctcatctataaaatgagggacttccctagaagtcttcatggtctcttccagcccagacatcctgtgatgtcatgaaagcacctgccctctgtttcccctcagaacaccctgtaccatccatggagcacgaggccttcagaaaagacacttcaatgggagtgaacatttctaactaaggacaggatggctgtgtgtggtggtcaccaggtcctgtgagcaaagtgcaggttatgcaagtcgccaggcaggaggccattccaggagtgggattattcatcaaactctttgcccagttcatcccaatgggggaagtattcccttctttcctactctgggaagaatgtctcctgccactcctcaactgatgatagacttcgaaaacagatgagaagactagcagctagcaagggtgcttgtagtcacactgtggaacactaaagagctaggaaagagttgagcacaggcaacattacaaacaaaggatttgaaaacaccaagagtacaggtcttctttaaggaagaataaaaaagaagaggttcatttttctggctttttttttcacctgaaacactttttctcgagtccaaaatcattccccccgtgaagtctgcttaccaaaacataagacgacttatatatttgaaagaagtcaaatgaatgagctctctaatagaagtccatgagttgagtgggtatttcttatttgaaagtgtttttctttaatcaaaagtccttagaatgagggaaacaaaatatttatttgttttggaatcccacttatcaaatcattcaaaactttcagctggagtggggtttgcttttgttttgtttgtgtccataagagaaatggtagaagatgaatcagtatgaagacactgtcaatgaggttatgagaaaaaaacagcaggggcattagtttcaggcaaggcagctcccaggtttagagattaatttttaccccctaaggaatatccagtcaaagacgctgagtgggagctgtcaggcagtagcagctgtgtttgagtttctggctgaaaatggtgaagaatggacttaattatgctaacaaactgaaaaatctagacatagatcctctgatatacaattagagatatttttatatagaccccaagcattctgtgcataaaagttaacattaggctgtggtgcagtaaccatttaatgtcgaggctctatttcggaaatacactacaaatgttaaagtacgtggctgtcctcttaagacactagtagagcaaagacttaatcatatcaacttaattctgttacacaatatgtgttttttaatatactaaccatttcttatggaaaggtcctgtggggagcccatcctctcgccaagccatcacaggctctgcatacacatgcactcagtgtggactgggaagcattactttgtagatgtattttcaataaagaaaaaaatagttttacatt

SEQ ID NO: 154 - protein, 542 aa, Homo sapiens
MTKSNGEEPKMGGRMERFQQGVRKRTLLAKKKVQNITKEDVKSYLFRNAFVLLTVTAVIVGTILGFTLRPYRMSYREVKYFSFPGELLMRMLQMLVLPLIISSLVTGMAALDSKASGKMGMRAVVYYMTTTIIAVVIGIIIVIIIHPGKGTKENMHREGKIVRVTAADAFLDLIRNMFPPNLVEACFKQFKTNYEKRSFKVPIQANETLVGAVINNVSEAMETLTRITEELVPVPGSVNGVNALGLVVFSMCFGFVIGNMKEQGQALREFFDSLNEAIMRLVAVIMWYAPVGILFLIAGKIVEMEDMGVIGGQLAMYTVTVIVGLLIHAVIVLPLLYFLVTRKNPWVFIGGLLQALITALGTSSSSATLPITFKCLEENNGVDKRVTRFVLPVGATINMDGTALYEALAAIFIAQVNNFELNFGQIITISITATAASIGAAGIPQAGLVTMVIVLTSVGLPTDDITLIIAVDWFLDRLRTTTNVLGDSLGAGIVEHLSRHELKNRDVEMGNSVIEENEMKKPYQLIAQDNETEKPIDSETKM

SEQ ID NO: 155 - DNA, 2315 bp, Homo sapiens
ccggcgtcccaagtgagtggaggggggatcccgactccagtccggggccttggccagcggagccgcgctattcggaagcgggaatcccactcagagcccgggcctgtaggggcggggcgtcccgggcacccgggattggggcgtctcccgtcgtgcaccggggcaccggcgactcacccggaaggagaagccgtgatctggctatatggtggggcgcgggcggtgtcgctgtggggagctggtgctgttctcagatgtttccttccaatgggcttttggtgtaggatgtcggagaaccaagaacaggaggaggtgattacagtgcgtgttcaggacccccgagtgcagaatgagggctcctggaactcttatgtggattataagatattcctccataccaacagcaaagcctttactgccaagacttcctgtgtgcggcgccgctaccgtgagttcgtgtggctgagaaagcagctacagagaaatgctggtttggtgcctgttcctgaacttcctgggaagtcaaccttcttcggcacctcagatgagttcattgagaagcgacgacaaggtctgcagcacttccttgaaaaggtcctgcagagtgtggttctcctgtcagacagccagttgcacctattcctgcaaagccagctctcggtgcctgagatagaagcctgtgtccagggccgaagtaccatgactgtgtctgatgccattcttcgatatgctatgtcaaactgtggctgggcccaggaagagaggcagagctcttctcacctggctaaaggagaccagcctaagagttgctgctttcttccaagatcgggtaggaggagctctccctcaccgcctcccagtgaagaaaaggaccatttagaagtgtgggctccagttgttgactctgaggttccttccttggaaagtcccactctcccacccctctcctcaccattatgctgtgattttggaagacccaaagagggaacctccactcttcagtctgtgaggagggctgtgggaggagatcatgctgtgcctttggaccctggtcagttagaaacagttttggaaaagtgagctctgggttctgctctgagatggtcagagaagatgcgggccaggagacttactcaggtgggactgggcacagggcaggtatgtgggaggctgggctgcttagtgtcttctagtcacctctgcttgggctgattgacagaggtcagtcattacagccccttatgcctcttccatgggaacaaatactgtgcagatgtttgtaagttaaacataagacacaggggctgttgcttttgaacagaaccctatattactctcctgggatctgagtttctgcaggtcatttgtatgtaggaccaggagtatctcctcaggtgaccagttttggggacccgtatgtggcaaattctaagctgccatattgaacatcatcccactgggagtggttatgttgtatccccatcttggctggcttcagtttttgctgtagccctagagcactttgtttgtgggaggctggcctcttgcctacctccttgcatggacagggggatgaatatttactttcccacctccttgctttttctttcactgataccactgaatggaactggtgctgtgactcctgctgctggggatttatgtcccgagaccttagcctggctgagtggagcctgagacctgcacaacagctcatggtcatgcatgagagagaagtggctggccacagccagagggaacagtaacagcccaggggcctttattttgggaaaggctgtcccgggctgttactgtctcttctggttataaagcagacatgtggccatcttttccgcagggttagagtgggctcctttctttttggaatccttttcttctcctttggtagcagctccctgcctccagggcttccgccaccagcgtctctgctgtgttgcgcagtgcagtggggtgcaagggctttgtttctgcctgcctgaaagagagggctctggggatggagatgagaaacaacacgctctccttcagacaatgaggcattctgtcctcctgctgccattcttcatctccactgagagccagagctggtaggagccgagtgccacaggcattctgcattgctctactcttaggtttgtgtgtgtgatccttcccctccctgtcgcccactcctccctcctctggctatcctaccctgtctgtgggctcttttactaccagcctatgctgtgggactgtcatggcatttagttcagagtggaggggctttggcctgaaataaaatgcaagtattt

SEQ ID NO: 156 - protein, 270 aa, Homo sapiens
MGFWCRMSENQEQEEVITVRVQDPRVQNEGSWNSYVDYKIFLHTNSKAFTAKTSCVRRRYREFVWLRKQLQRNAGLVPVPELPGKSTFFGTSDEFIEKRRQGLQHFLEKVLQSVVLLSDSQLHLFLQSQLSVPEIEACVQGRSTMTVSDAILRYAMSNCGWAQEERQSSSHLAKGDQPKSCCFLPRSGRRSSPSPPPSEEKDHLEVWAPVVDSEVPSLESPTLPPLSSPLCCDFGRPKEGTSTLQSVRRAVGGDHAVPLDPGQLETVLEK

SEQ ID NO: 157 - DNA, 3197 bp, Homo sapiens
ggaccacagctcctcccgtgcatccactcggcctgggaggttctggattttggctgtcgagggagtttgcctgcctctccagagaaagatggtcatgaggcccctgtggagtctgcttctctgggaagccctacttcccattacagttactggtgcccaagtgctgagcaaagtcgggggctcggtgctgctggtggcagcgcgtccccctggcttccaagtccgtgaggctatctggcgatctctctggccttcagaagagctcctggccacgtttttccgaggctccctggagactctgtaccattcccgcttcctgggccgagcccagctacacagcaacctcagcctggagctcgggccgctggagtctggagacagcggcaacttctccgtgttgatggtggacacaaggggccagccctggacccagaccctccagctcaaggtgtacgatgcagtgcccaggcccgtggtacaagtgttcattgctgtagaaagggatgctcagccctccaagacctgccaggttttcttgtcctgttgggcccccaacatcagcgaaataacctatagctggcgacgggagacaaccatggactttggtatggaaccacacagcctcttcacagacggacaggtgctgagcatttccctgggaccaggagacagagatgtggcctattcctgcattgtctccaaccctgtcagctgggacttggccacagtcacgccctgggatagctgtcatcatgaggcagcaccagggaaggcctcctacaaagatgtgctgctggtggtggtgcctgtctcgctgctcctgatgctggttactctcttctctgcctggcactggtgcccctgctcagggaaaaagaaaaaggatgtccatgctgacagagtgggtccagagacagagaacccccttgtgcaggatctgccataaaggacaatatgaactgatgcctggactatcagtaaccccactgcacaggcacacgatgctctgggacataactggtgcctggaaatcaccatggtcctcatatctcccatgggaatcctgtcctgcctcgaaggagcagcctgggcagccatcacaccacgaggacaggaagcaccagcacgtttcacacctcccccttccctctcccatcttctcatatcctggctcttctctgggcaagatgagccaagcagaacattccatccaggacactggaagttctccaggatccagatccatggggacattaatagtccaaggcattccctcccccaccactattcataaagtattaaccaactggcaccaaggaattgcctccagcctgagtcctaggctctaaaagatattacatatttgaactaatagaggaactctgagtcacccatgccagcatcagcttcagccccagaccctgcagtttgagatctgatgcttcctgagggccaaggcattgctgtaagaaaaggtctagaaataggtgaaagtgagaggtgggggacaggggtttctctttctggcctaaggactttcaggtaatcagagttcatgggccctcaaaggtaaattgcagttgtagacaccgaggatggttgacaacccatggttgagatgggcaccgttttgcaggaaacaccatattaatagacatcctcaccatctccatccgctctcacgcctcctgcaggatctgggagtgagggtggagagtctttcctcacgctccagcacagtggccaggaaaagaaatactgaatttgccccagccaacaggacgttcttgcacaacttcaagaaaagcagctcagctcaggatgagtcttcctgcctgaaactgagagagtgaagaaccataaaacgctatgcagaaggaacattatggagagaaagggtactgaggcactctagaatctgccacattcattttcaaatgcaaatgcagaagacttaccttagttcaaggggaggggacaaagaccccacagcccaacagcaggactgtagaggtcactctgactccatcaaactttttattgtggccatcttaggaaaatacattctgcccctgaatgattctgtctagaaaagctctggagtattgatcactactggaaaaacacttaaggagctaaacttaccttcggggattattagctgataaggttcacagtttctctcacccaggtgtaactggattttttctggggcctcaatccagtcttgataacagcgaggaaagaggtattgaagaaacaggggtgggtttgaagtactattttccccagggtggcttcaatctccccacctaggatgtcagccctgtccaaggaccttccctcttctcccccagttccctgggcaatcacttcaccttggacaaaggatcagcacagctggcctccagatccacatcaccactcttccactcgattgttcccagatcctccctgcctggcctgctcagaggttccctgttggtaacctggctttatcaaattctcatccctttcccacacccacttctctcctatcaccttcccccaagattacctgaacagggtccatggccactcaacctgtcagcttgcaccatccccacctgccacctacagtcaggccacatgcctggtcactgaatcatgcaaaactggcctcagtccctaaaaatgatgtggaaaggaaagcccaggatctgacaatgagccctggtggatttgtggggaaaaaatacacagcactccccacctttctttcgttcatctccagggccccacctcagatcaaagcagctctggatgagatgggacctgcagctctccctccacaaggtgactcttagcaacctcatttcgacagtggtttgtagcgtggtgcaccagggccttgttgaacagatccacactgctctaataaagttcccatccttaatgactcacttgtcaactagtggactaattaaccctccaccaaaaaaacacaaagtgcttctgtgagaccaattttgtgctaatgagcattgagactgatgctttgtaagtcacaccacaacaaatattgattgagggcgctgcatgtgctgggtacatttcttggcacttgggaatcagtagtcaagcgaaacccttgcctttgagagtttatggtctggataatataaataaacaagtaagcataaaaaaaaaaaaaaaaa

SEQ ID NO: 158 - protein, 285 aa, Homo sapiens
MVMRPLWSLLLWEALLPITVTGAQVLSKVGGSVLLVAARPPGFQVREAIWRSLWPSEELLATFFRGSLETLYHSRFLGRAQLHSNLSLELGPLESGDSGNFSVLMVDTRGQPWTQTLQLKVYDAVPRPVVQVFIAVERDAQPSKTCQVFLSCWAPNISEITYSWRRETTMDFGMEPHSLFTDGQVLSISLGPGDRDVAYSCIVSNPVSWDLATVTPWDSCHHEAAPGKASYKDVLLVVVPVSLLLMLVTLFSAWHWCPCSGKKKKDVHADRVGPETENPLVQDLP

SEQ ID NO: 159 - DNA, 4103 bp, Homo sapiens
ggagccctgggcgcgggggcggcgtgtcaggtggttgcggagctggtaagaatcatattctaagaactcagccactcaggtatccaccatggtgctgggtcctgaacagaagatgtcagatgacagtgtttctggagatcatggggagtctgccagtcttggtaacatcaaccctgcctatagtaatccctctctttcacagtcccctggggactcagaggagtacttcgccacttactttaatgagaagatctccattcctgaggaggagtactcttgttttagctttcgtaaactctgggctttcaccggaccaggttttcttatgagcattgcctacctggatccaggaaatattgaatccgatttgcagtctggagcagtggctggatttaagttgctctggatccttctgttggccacccttgtggggctgctgctccagcggcttgcagctagactgggagtggttactgggctgcatcttgctgaagtatgtcaccgtcagtatcccaaggtcccacgagtcatcctgtggctgatggtggagttggctatcatcggctcagacatgcaagaagtcattggctcagccattgctatcaatcttctgtctgtaggaagaattcctctgtggggtggcgttctcatcaccattgcagatacttttgtatttctcttcttggacaaatatggcttgcggaagctagaagcattttttggctttctcatcactattatggccctcacatttggatatgagtatgttacagtgaaacccagccagagccaggtactcaagggcatgttcgtaccatcctgttcaggctgtcgcactccacagattgaacaggctgtgggcatcgtgggagctgtcatcatgccacacaacatgtacctgcattctgccttagtcaagtctagacaggtaaaccggaacaataagcaggaagttcgagaagccaataagtactttttcattgaatcctgcattgcactctttgtttccttcatcatcaatgtctttgttgtctcagtctttgctgaagcattttttgggaaaaccaacgagcaggtggttgaagtctgtacaaataccagcagtcctcatgctggcctctttcctaaagataactcgacactggctgtggacatctacaaagggggtgttgtgctgggatgttactttgggcctgctgcactctacatttgggcagtggggatcctggctgcaggacagagctccaccatgacaggaacctattctggccagtttgtcatggagggattcctgaacctaaagtggtcacgctttgcccgagtggttctgactcgctctattgccatcatccccactctgcttgttgctgtcttccaagatgtagagcatctaacagggatgaatgactttctgaatgttctacagagcttacagcttccctttgctctcatacccatcctcacatttacgagcttgcggccagtaatgagtgactttgccaatggactaggctggcggattgcaggaggaatcttggtccttatcatctgttccatcaatatgtactttgtagtggtttatgtccgggacctagggcatgtggcattatatgtggtggctgctgtggtcagcgtggcttatctgggctttgtgttctacttgggttggcaatgtttgattgcactgggcatgtccttcctggactgtgggcatacggtaagcatctctaaaggcctgctgacagaagaagccacccgtggctacgttaaataacactggattagtctgtcttctgcaggtagccatcagagccagtgtgtttctatggtttactgtgtgaacatagccaaaagtatgtgccgttgcacagactgtgtttatgactcaaccgttggttggaaaagactttgtttcatgtgtatttgaaagatggaattattttttccttcctgacctaaccttagaactggattagggtgggatctttgaaaagctgacatttgctgctatcattccaacactaaattcttaagtagttgcccaagggccagctcagtttatccttcggagagacaaggatatgcatgattcttaaccaggctatatgttaaaaaaaaattggaaaatgcaatacattttttattatacaaactacagaatgagtatgcaagttttatttatcaaaatgtaatggatttttaaaggctgagaaattttccttatacctaccttttcagttattttaattataccaaattatcaactagaatagcttcatccatatgaaatataaaatgaagagacacctagctctatcaggcttaggattctttgaacttatttccactttaatttctcagtggaagttaagaggggtgagaaaacaaagaaggggaaaaactgacaactaacaaaaccagcaccacatcgctaggtggtgcttactaattaccttctcaggattttcctcagattgaaaagcttatgaggatttcttgggagtcttaataacctgcctgttagtacagagctttcctgatgatatttactcttgagcacatgtggttgtaaaaccttaactttctttctccaggagggtggtgatagaaacagatggtagtatttatgaactgatgttctcgtgaaatgttgagggtggggagaaaagactttaagggaggagagccatctattttgttcctaaagccacctctcagcagaatcgtcatgtttttctgatgcaccgctctgcttcatgcccaagatgacttgcgaggcaatctcaggagctgtggacttaaccgttgcaaagcacactgtctttctcagcgttctctgcaagtcagtaggtgttagtatggttgcaaagttcactgtctcagcaaagttgaactgggctacctctctacagctgtttcctcagagggaaaaatcttgagaccatggtggagctctggagtcagaggaaatgggtgtcttcagcacaaagctgctgcttttacttcagccacttctgacatttttacataccgagcctgagattgtgtgattatctcaaatcaaatcactttgatggagataaataatcaaaactgttttatagtcattgatttggtgagaacagtaatggaaaatggtgttgaaggacttctcatttttggagctttccttccagagtcctggctgattggtgttcgctgttcatctgagcccccaaaagcattattactgatacttgcacacagtcaaaagcgcagactggatggatggtcttttataaggcatttaagggtacactactgtgtttcactgaccatacatttttcttagcccctcaagtaatatagcacagagttatgaatgacaattcccctaaccattcctcttcatatctgcctcttccccttaccatcgtaattctccaaactggtcataaaggcactctgtgaagatattggggactgacatcttaagctctcacctggctgcagtaggaaaggccaaactgacgacaaaaaaaaaattctttataaagatgatatggtaacatgtatctttgccctgggtctgggtgggtccagtcagtctcagatttacaagcatttaggagcctaggtaaaagctgctagtattcttttaaaagttatatttatgacttgcaatgatagaaaactccttccaattaaatggcattttataatattatgtgtgtacttcacagtgttaaaaataccctcatacgttattgcatttgatcttcacagaaagtgcattttaaccagtactctgggtgcaataaataatatgtagaaatttaagtcctccaattccagcatatccagtgagttttgacagtgtgtttatgtggaatgtttaaggatatacaattgtactttatataaattggttcttgttcttcttaaatgtgacatgaaataattgtgctgctacattatactggaaattaacaggggaaaagggaagagctcttggctcccttgaggttctgctagtggtgttaggagtggttacaactgagcttttagtaaccatttaaccgtatgtaaacttggtttctaattaaaaaaaaatttctttttcc

SEQ ID NO: 160 - protein, 561 aa, Homo sapiens
MVLGPEQKMSDDSVSGDHGESASLGNINPAYSNPSLSQSPGDSEEYFATYFNEKISIPEEEYSCFSFRKLWAFTGPGFLMSIAYLDPGNIESDLQSGAVAGFKLLWILLLATLVGLLLQRLAARLGVVTGLHLAEVCHRQYPKVPRVILWLMVELAIIGSDMQEVIGSAIAINLLSVGRIPLWGGVLITIADTFVFLFLDKYGLRKLEAFFGFLITIMALTFGYEYVTVKPSQSQVLKGMFVPSCSGCRTPQIEQAVGIVGAVIMPHNMYLHSALVKSRQVNRNNKQEVREANKYFFIESCIALFVSFIINVFVVSVFAEAFFGKTNEQVVEVCTNTSSPHAGLFPKDNSTLAVDIYKGGVVLGCYFGPAALYIWAVGILAAGQSSTMTGTYSGQFVMEGFLNLKWSRFARVVLTRSIAIIPTLLVAVFQDVEHLTGMNDFLNVLQSLQLPFALIPILTFTSLRPVMSDFANGLGWRIAGGILVLIICSINMYFVVVYVRDLGHVALYVVAAVVSVAYLGFVFYLGWQCLIALGMSFLDCGHTVSISKGLLTEEATRGYVK

SEQ ID NO: 161 - DNA, 1145 bp, Homo sapiens
gctccggccagccgcggtccagagcgcgcgaggttcggggagctccgccaggctgctggtacctgcgtccgcccggcgagcaggacaggctgctttggtttgtgacctccaggcaggacggccatcctctccagaatgaagatcttcttgccagtgctgctggctgcccttctgggtgtggagcgagccagctcgctgatgtgcttctcctgcttgaaccagaagagcaatctgtactgcctgaagccgaccatctgctccgaccaggacaactactgcgtgactgtgtctgctagtgccggcattgggaatctcgtgacatttggccacagcctgagcaagacctgttccccggcctgccccatcccagaaggcgtcaatgttggtgtggcttccatgggcatcagctgctgccagagctttctgtgcaatttcagtgcggccgatggcgggctgcgggcaagcgtcaccctgctgggtgccgggctgctgctgagcctgctgccggccctgctgcggtttggcccctgaccgcccagaccctgtcccccgatcccccagctcaggaaggaaagcccagccctttctggatcccacagtgtatgggagcccctgactcctcacgtgcctgatctgtgcccttggtcccaggtcaggcccaccccctgcacctccacctgccccagcccctgcctctgcccaagtgggccagctgccctcacttctggggtggatgatgtgaccttccttgggggactgcggaagggacgagggttccctggagtcttacggtccaacatcagaccaagtcccatggacatgctgacagggtccccagggagaccgtgtcagtagggatgtgtgcctggctgtgtacgtgggtgtgcagtgcacgtgagagcacgtggcggcttctgggggccatgtttggggagggaggtgtgccagcagcctggagagcctcagtccctgtagccccctgccctggcacagctgcatgcacttcaagggcagcctttgggggttggggtttctgccacttccgggtctaggccctgcccaaatccagccagtcctgccccagcccacccccacattggagccctcctgctgctttggtgcctcaaataaatacagatgtcccc

SEQ ID NO: 162 - protein, 131 aa, Homo sapiens
MKIFLPVLLAALLGVERASSLMCFSCLNQKSNLYCLKPTICSDQDNYCVTVSASAGIGNLVTFGHSLSKTCSPACPIPEGVNVGVASMGISCCQSFLCNFSAADGGLRASVTLLGAGLLLSLLPALLRFGP

SEQ ID NO: 163 - DNA, 3258 bp, Homo sapiens
aaggctgtggaccccagagaaggtggcaggtggcccccctaggagagctctgggcacattcgaatcttcccaaactccaataataaaaattcgaagactttggcagagagtgtgtgtgtgtgtgtatggttgttgggcgtaggacaggtttcggggatgcgcggtacgcggtaccacccctcggaggcccccacccccagacgcccaggccgcctccccactccccctcaagcagccccagccggggactttccgtcgcggggaaggggcggggaccctgagcgaaaggtgcggaggcggcctgccggggtggttcggcttcccgttgccgcctcgggcgctgtacccagagctcgaagaggagcagcgcggccgcgcggacccggcaaggctgggccggactcggggctcccgagggacgccatgcggggaggcaggggcgcccctttctggctgtggccgctgcccaagctggcgctgctgcctctgttgtgggtgcttttccagcggacgcgtccccagggcagcgccgggccactgcagtgctacggagttggacccttgggcgacttgaactgctcgtgggagcctcttggggacctgggagccccctccgagttacacctccagagccaaaagtaccgttccaacaaaacccagactgtggcagtggcagccggacggagctgggtggccattcctcgggaacagctcaccatgtctgacaaactccttgtctggggcactaaggcaggccagcctctctggccccccgtcttcgtgaacctagaaacccaaatgaagccaaacgccccccggctgggccctgacgtggacttttccgaggatgaccccctggaggccactgtccattgggccccacctacatggccatctcataaagttctgatctgccagttccactaccgaagatgtcaggaggcggcctggaccctgctggaaccggagctgaagaccatacccctgacccctgttgagatccaagatttggagctagccactggctacaaagtgtatggccgctgccggatggagaaagaagaggatttgtggggcgagtggagccccattttgtccttccagacaccgccttctgctccaaaagatgtgtgggtatcagggaacctctgtgggacgcctggaggagaggaacctttgcttctatggaaggccccagggccctgtgtgcaggtgagctacaaagtctggttctgggttggaggtcgtgagctgagtccagaaggaattacctgctgctgctccctaattcccagtggggcggagtgggccagggtgtccgctgtcaacgccacaagctgggagcctctcaccaacctctctttggtctgcttggattcagcctctgccccccgtagcgtggcagtcagcagcatcgctgggagcacggagctactggtgacctggcaaccggggcctggggaaccactggagcatgtagtggactgggctcgagatggggaccccctggagaaactcaactgggtccggcttccccctgggaacctcagtgctctgttaccagggaatttcactgtcggggtcccctatcgaatcactgtgaccgcagtctctgcttcaggcttggcctctgcatcctccgtctgggggttcagggaggaattagcacccctagtggggccaacgctttggcgactccaagatgcccctccagggacccccgccatagcgtggggagaggtcccaaggcaccagcttcgaggccacctcacccactacaccttgtgtgcacagagtggaaccagcccctccgtctgcatgaatgtgagtggcaacacacagagtgtcaccctgcctgaccttccttggggtccctgtgagctgtgggtgacagcatctaccatcgctggacagggccctcctggtcccatcctccggcttcatctaccagataacaccctgaggtggaaagttctgccgggcatcctattcttgtggggcttgttcctgttggggtgtggcctgagcctggccacctctggaaggtgctaccacctaaggcacaaagtgctgccccgctgggtctgggagaaagttcctgatcctgccaacagcagttcaggccagccccacatggagcaagtacctgaggcccagccccttggggacttgcccatcctggaagtggaggagatggagcccccgccggttatggagtcctcccagcccgcccaggccaccgccccgcttgactctgggtatgagaagcacttcctgcccacacctgaggagctgggccttctggggccccccaggccacaggttctggcctgaaccacacgtctggctgggggctgccagccaggctagagggatgctcatgcaggttgcaccccagtcctggattagccctcttgatggatgaagacactgaggactcagagaggctgagtcacttacctgaggacacccagccaggcagagctgggattgaaggacccctatagagaagggcttggcccccatggggaagacacggatggaaggtggagcaaaggaaaatacatgaaattgagagtggcagctgcctgccaaaatctgttccgctgtaacagaactgaatttggaccccagcacagtggctcacgcctgtaatcccagcactttggcaggccaaggtggaaggatcacttagagctaggagtttgagaccagcctgggcaatatagcaagacccctcactacaaaaataaaacatcaaaaacaaaaacaattagctgggcatgatggcacacacctgtagtccgagccacttgggaggctgaggtgggaggatcggttgagcccaggagttcgaagctgcagggacctctgattgcaccactgcactccaggctgggtaacagaatgagaccttatctcaaaaataaacaaactaataaaaagcaaaaaaaaaaaaaaaagaaaagaaaaaacactgcatttgggcaccatctcagctcccttgcatccaggtgcagcatggactgagttcttgacaacagaatgtggtcagaagtgacatatgccaacacggggtctgggtgggggctcccccacatcctttccttgcctatgagctggaacataacacatgcctatgatccagctttggtcatacccaaggggaaggtggagcaagaaatgaaaaggaacctgaatccctgaatgactgcatggatagaaccactaagaaaaataaacttttatatttttata

SEQ ID NO: 164 - protein, 636 aa, Homo sapiens
MRGGRGAPFWLWPLPKLALLPLLWVLFQRTRPQGSAGPLQCYGVGPLGDLNCSWEPLGDLGAPSELHLQSQKYRSNKTQTVAVAAGRSWVAIPREQLTMSDKLLVWGTKAGQPLWPPVFVNLETQMKPNAPRLGPDVDFSEDDPLEATVHWAPPTWPSHKVLICQFHYRRCQEAAWTLLEPELKTIPLTPVEIQDLELATGYKVYGRCRMEKEEDLWGEWSPILSFQTPPSAPKDVWVSGNLCGTPGGEEPLLLWKAPGPCVQVSYKVWFWVGGRELSPEGITCCCSLIPSGAEWARVSAVNATSWEPLTNLSLVCLDSASAPRSVAVSSIAGSTELLVTWQPGPGEPLEHVVDWARDGDPLEKLNWVRLPPGNLSALLPGNFTVGVPYRITVTAVSASGLASASSVWGFREELAPLVGPTLWRLQDAPPGTPAIAWGEVPRHQLRGHLTHYTLCAQSGTSPSVCMNVSGNTQSVTLPDLPWGPCELWVTASTIAGQGPPGPILRLHLPDNTLRWKVLPGILFLWGLFLLGCGLSLATSGRCYHLRHKVLPRWVWEKVPDPANSSSGQPHMEQVPEAQPLGDLPILEVEEMEPPPVMESSQPAQATAPLDSGYEKHFLPTPEELGLLGPPRPQVLA

SEQ ID NO: 165 - DNA, 3178 bp, Homo sapiens
ggcaccgattcggggcctgcccggacttcgccgcacgctgcagaacctcgcccagcgcccaccatgccccggcagctcagcgcggcggccgcgctcttcgcgtccctggccgtaattttgcacgatggcagtcaaatgagagcaaaagcatttccagaaaccagagattattctcaacctactgcagcagcaacagtacaggacataaaaaaacctgtccagcaaccagctaagcaagcacctcaccaaactttagcagcaagattcatggatggtcatatcacctttcaaacagcggccacagtaaaaattccaacaactaccccagcaactacaaaaaacactgcaaccaccagcccaattacctacaccctggtcacaacccaggccacacccaacaactcacacacagctcctccagttactgaagttacagtcggccctagcttagccccttattcactgccacccaccatcaccccaccagctcatacagctggaaccagttcatcaaccgtcagccacacaactgggaacaccactcaacccagtaaccagaccacccttccagcaactttatcgatagcactgcacaaaagcacaaccggtcagaagcctgatcaacccacccatgccccaggaacaacggcagctgcccacaataccacccgcacagctgcacctgcctccacggttcctgggcccacccttgcacctcagccatcgtcagtcaagactggaatttatcaggttctaaacggaagcagactctgtataaaagcagagatggggatacagctgattgttcaagacaaggagtcggttttttcacctcggagatacttcaacatcgaccccaacgcaacgcaagcctctgggaactgtggcacccgaaaatccaaccttctgttgaattttcagggcggatttgtgaatctcacatttaccaaggatgaagaatcatattatatcagtgaagtgggagcctatttgaccgtctcagatccagagacagtttaccaaggaatcaaacatgcggtggtgatgttccagacagcagtcgggcattccttcaagtgcgtgagtgaacagagcctccagttgtcagcccacctgcaggtgaaaacaaccgatgtccaacttcaagcctttgattttgaagatgaccactttggaaatgtggatgagtgctcgtctgactacacaattgtgcttcctgtgattggggccatcgtggttggtctctgccttatgggtatgggtgtctataaaatccgcctaaggtgtcaatcatctggataccagagaatctaattgttgcccggggggaatgaaaataatggaatttagagaactctttcatcccttccaggatggatgttgggaaattccctcagagtgtgggtccttcaaacaatgtaaaccaccatcttctattcaaatgaagtgagtcatgtgtgatttaagttcaggcagcacatcaatttctaaatactttttgtttattttatgaaagatatagtgagctgtttattttctagtttcctttagaatattttagccactcaaagtcaacatttgagatatgttgaattaacataatatatgtaaagtagaataagccttcaaattataaaccaagggtcaattgtaactaatactactgtgtgtgcattgaagattttattttacccttgatcttaacaaagcctttgctttgttatcaaatggactttcagtgcttttactatctgtgttttatggtttcatgtaacatacatattcctggtgtagcacttaactccttttccactttaaatttgtttttgttttttgagacggagtttcactcttgtcacccaggctggagtacagtggcacgatctcggcttatggcaacctccgcctcccgggttcaagtgattctcctgcttcagcttcccgagtagctgggattacaggcacacactaccacgcctggctaatttttgtatttttattatagacgggtttcaccatgttggccagactggtcttgaactcttgacctcaggtgatccacccacctcagcctcccaaagtgctgggattacaggcatgagccattgcgcccggccttaaatgttttttttaatcatcaaaaagaacaacatatctcaggttgtctaagtgtttttatgtaaaaccaacaaaaagaacaaatcagcttatattttttatcttgatgactcctgctccagaattgctagactaagaattaggtggctacagatggtagaactaaacaataagcaagagacaataataatggcccttaattattaacaaagtgccagagtctaggctaagcactttatctatatctcatttcattctcacaacttataagtgaatgagtaaactgagacttaagggaactgaatcacttaaatgtcacctggctaactgatggcagagccagagcttgaattcatgttggtctgacatcaaggtctttggtcttctccctacaccaagttacctacaagaacaatgacaccacactctgcctgaaggctcacacctcataccagcatacgctcaccttacagggaaatgggtttatccaggatcatgagacattagggtagatgaaaggagagctttgcagataacaaaatagcctatccttaataaatcctccactctctggaaggagactgaggggctttgtaaaacattagtcagttgctcatttttatgggattgcttagctgggctgtaaagatgaaggcatcaaataaactcaaagtatttttaaatttttttgataatagagaaacttcgctaaccaactgttctttcttgagtgtatagccccatcttgtggtaacttgctgcttctgcacttcatatccatatttcctattgttcactttattctgtagagcagcctgccaagaattttatttctgctgttttttttgctgctaaagaaaggaactaagtcaggatgttaacagaaaagtccacataaccctagaattcttagtcaaggaataattcaagtcagcctagagaccatgttgactttcctcatgtgtttccttatgactcagtaagttggcaaggtcctgactttagtcttaataaaacattgaattgtagtaaaggtttttgcaataaaaacttactttgg

SEQ ID NO: 166 - protein, 416 aa, Homo sapiens
MPRQLSAAAALFASLAVILHDGSQMRAKAFPETRDYSQPTAAATVQDIKKPVQQPAKQAPHQTLAARFMDGHITFQTAATVKIPTTTPATTKNTATTSPITYTLVTTQATPNNSHTAPPVTEVTVGPSLAPYSLPPTITPPAHTAGTSSSTVSHTTGNTTQPSNQTTLPATLSIALHKSTTGQKPDQPTHAPGTTAAAHNTTRTAAPASTVPGPTLAPQPSSVKTGIYQVLNGSRLCIKAEMGIQLIVQDKESVFSPRRYFNIDPNATQASGNCGTRKSNLLLNFQGGFVNLTFTKDEESYYISEVGAYLTVSDPETVYQGIKHAVVMFQTAVGHSFKCVSEQSLQLSAHLQVKTTDVQLQAFDFEDDHFGNVDECSSDYTIVLPVIGAIVVGLCLMGMGVYKIRLRCQSSGYQRI

SEQ ID NO: 167 - DNA, 5130 bp, Homo sapiens
atgggcttcttgcccaagcttctcctcctggcctcattcttcccagcaggccaggcctcatggggcgtctccagtccccaggacgtgcagggtgtgaaggggtcttgcctgcttatcccctgcatcttcagcttccctgccgacgtggaggtgcccgacggcatcacggccatctggtactacgactactcgggccagcggcaggtggtgagccactcggcggaccccaagctggtggaggcccgcttccgcggccgcaccgagttcatggggaaccccgagcacagggtgtgcaacctgctgctgaaggacctgcagcccgaggactctggttcctacaacttccgcttcgagatcagtgaggtcaaccgctggtcagatgtgaaaggcaccttggtcacagtaacagaggagcccagggtgcccaccattgcctccccggtggagcttctcgagggcacagaggtggacttcaactgctccactccctacgtatgcctgcaggagcaggtcagactgcagtggcaaggccaggaccctgctcgctctgtcaccttcaacagccagaagtttgagcccaccggcgtcggccacctggagaccctccacatggccatgtcctggcaggaccacggccggatcctgcgctgccagctctccgtggccaatcacagggctcagagcgagattcacctccaagtgaagtatgcccccaagggtgtgaagatcctcctcagcccctcggggaggaacatccttccaggtgagctggtcacactcacctgccaggtgaacagcagctaccctgcagtcagttccattaagtggctcaaggatggggtacgcctccaaaccaagactggtgtgctgcacctgccccaggcagcctggagcgatgctggcgtctacacctgccaagctgagaacggcgtgggctctttggtctcaccccccatcagcctccacatcttcatggctgaggtccaggtgagcccagcaggtcccatcctggagaaccagacagtgacactagtctgcaacacacccaatgaggcacccagtgatctccgctacagctggtacaagaaccatgtcctgctggaggatgcccactcccataccctccggctgcacttggccactagggctgatactggcttctacttctgtgaggtgcagaacgtccatggcagcgagcgctcgggccctgtcagcgtggtagtcaaccacccgcctctcactccagtcctgacagccttcctggagacccaggcgggacttgtgggcatccttcactgctctgtggtcagtgagcccctggccacactggtgctgtcacatgggggtcatatcctggcctccacctccggggacagtgatcacagcccacgcttcagtggtacctctggtcccaactccctgcgcctggagatccgagacctggaggaaactgacagtggggagtacaagtgctcagccaccaactcccttggaaatgcaacctccaccctggacttccatgccaatgccgcccgtctcctcatcagcccggcagccgaggtggtggaaggacaggcagtgacactgagctgcagaagcggcctaagccccacacctgatgcccgcttctcctggtacctgaatggagccctgcttcacgagggtcccggcagcagcctcctgctccccgcggcctccagcactgacgccggctcataccactgccgggcccgggacggccacagtgccagtggcccctcttcgccagctgttctcactgtgctctacccccctcgacaaccaacattcaccaccaggctggaccttgatgccgctggggccggggctggacggcgaggcctccttttgtgccgtgtggacagcgacccccccgccaggctgcagctgctccacaaggaccgtgttgtggccacttccctgccatcagggggtggctgcagcacctgtgggggctgttccccacgcatgaaggtcaccaaagcccccaacttgctgcgtgtggagattcacaaccctttgctggaagaggagggcttgtacctctgtgaggccagcaatgccctgggcaacgcctccacctcagccaccttcaatggccaggccactgtcctggccattgcaccatcacacacacttcaggagggcacagaagccaacttgacttgcaacgtgagccgggaagctgctggcagccctgctaacttctcctggttccgaaatggggtgctgtgggcccagggtcccctggagaccgtgacactgctgcccgtggccagaactgatgctgccctttacgcctgccgcatcctgactgaggctggtgcccagctctccactcccgtgctcctgagtgtactctatcccccggaccgtccaaagctgtcagccctcctagacatgggccagggccacatggctctgttcatctgcactgtggacagccgccccctggccttgctggccttgttccatggggagcacctcctggccaccagcctgggtccccaggtcccatcccatggtcggttccaggctaaagctgaggccaactccctgaagttagaggtccgagaactgggccttggggactctggcagctaccgctgtgaggccacaaatgttcttggatcatccaacacctcactcttcttccaggtccgaggagcctgggtccaggtgtcaccatcacctgagctccaagagggccaggctgtggtcctgagctgccaggtacacacaggagtcccagaggggacctcatatcgttggtatcgggatggccagcccctccaggagtcgacctcggccacgctccgctttgcagccataactttgacacaagctggggcctatcattgccaagcccaggccccaggctcagccaccacgagcctagctgcacccatcagcctccacgtgtcctatgccccacgccacgtcacactcactaccctgatggacacaggccctggacgactgggcctcctcctgtgccgtgtggacagtgaccctccggcccagctgcggctgctccacggggatcgccttgtggcctccaccctacaaggtgtggggggacccgaaggcagctctcccaggctgcatgtggctgtggcccccaacacactgcgtctggagatccacggggctatgctggaggatgagggtgtctatatctgtgaggcctccaacaccctgggccaggcctcggcctcagctgacttcgacgctcaagctgtgaatgtgcaggtgtggcccggggctaccgtgcgggaggggcagctggtgaacctgacctgccttgtgtggaccactcacccggcccagctcacctacacatggtaccaggatgggcagcagcgcctggatgcccactccatccccctgcccaacgtcacagtcagggatgccacctcctaccgctgcggtgtgggcccccctggtcgggcaccccgcctctccagacctatcaccttggacgtcctctacgcgccccgcaacctgcgcctgacctacctcctggagagccatggcgggcagctggccctggtactgtgcactgtggacagccgcccgcccgcccagctggccctcagccacgccggtcgcctcttggcctcctcgacagcagcctctgtccccaacaccctgcgcctggagctgcgagggccacagcccagggatgagggtttctacagctgctctgcccgcagccctctgggccaggccaacacgtccctggagctgcggctggagggtgtgcgggtgatcctggctccggaggctgccgtgcctgaaggtgcccccatcacagtgacctgtgcggaccctgctgcccacgcacccacactctatacttggtaccacaacggtcgttggctgcaggagggtccagctgcctcactctcattcctggtggccacgcgggctcatgcaggcgcctactcttgccaggcccaggatgcccagggcacccgcagctcccgtcctgctgccctgcaagtcctctatgcccctcaggacgctgtcctgtcctccttccgggactccagggccagatccatggctgtgatacagtgcactgtggacagtgagccacctgctgagctggccctatctcatgatggcaaggtgctggccacgagcagcggggtccacagcttggcatcagggacaggccatgtccaggtggcccgaaacgccctacggctgcaggtgcaagatgtgcctgcaggtgatgacacctatgtttgcacagcccaaaacttgctgggctcaatcagcaccatcgggcggttgcaggtagaaggtgcacgcgtggtggcagagcctggcctggacgtgcctgagggcgctgccctgaacctcagctgccgcctcctgggtggccctgggcctgtgggcaactccacctttgcatggttctggaatgaccggcggctgcacgcggagcctgtgcccactctcgccttcacccacgtggctcgtgctcaagctgggatgtaccactgcctggctgagctccccactggggctgctgcctctgctccagtcatgctccgtgtgctctaccctcccaagacgcccaccatgatggtcttcgtggagcctgagggtggcctccggggcatcctggattgccgagtggacagcgagccgctcgccagcctgactctccaccttggcagtcgactggtggcctccagtcagccccagggtgctcctgcagagccacacatccatgtcctggcttcccccaatgccctgagggtggacatcgaggcgctgaggcccagcgaccaaggggaatacatctgttctgcctcaaatgtcctgggctctgcctctacctccacctactttggggtcagagccctgcaccgcctgcatcagttccagcagctgctctgggtcctgggactgctggtgggcctcctgctcctgctgttgggcctgggggcctgctacacctggagaaggaggcgtgtttgtaagcagagcatgggcgagaattcggtggagatggcttttcagaaagagaccacgcagctcattgatcctgatgcagccacatgtgagacctcaacctgtgccccacccctgggctga

SEQ ID NO: 168 - protein, 1709 aa, Homo sapiens
MGFLPKLLLLASFFPAGQASWGVSSPQDVQGVKGSCLLIPCIFSFPADVEVPDGITAIWYYDYSGQRQVVSHSADPKLVEARFRGRTEFMGNPEHRVCNLLLKDLQPEDSGSYNFRFEISEVNRWSDVKGTLVTVTEEPRVPTIASPVELLEGTEVDFNCSTPYVCLQEQVRLQWQGQDPARSVTFNSQKFEPTGVGHLETLHMAMSWQDHGRILRCQLSVANHRAQSEIHLQVKYAPKGVKILLSPSGRNILPGELVTLTCQVNSSYPAVSSIKWLKDGVRLQTKTGVLHLPQAAWSDAGVYTCQAENGVGSLVSPPISLHIFMAEVQVSPAGPILENQTVTLVCNTPNEAPSDLRYSWYKNHVLLEDAHSHTLRLHLATRADTGFYFCEVQNVHGSERSGPVSVVVNHPPLTPVLTAFLETQAGLVGILHCSVVSEPLATLVLSHGGHILASTSGDSDHSPRFSGTSGPNSLRLEIRDLEETDSGEYKCSATNSLGNATSTLDFHANAARLLISPAAEVVEGQAVTLSCRSGLSPTPDARFSWYLNGALLHEGPGSSLLLPAASSTDAGSYHCRARDGHSASGPSSPAVLTVLYPPRQPTFTTRLDLDAAGAGAGRRGLLLCRVDSDPPARLQLLHKDRVVATSLPSGGGCSTCGGCSPRMKVTKAPNLLRVEIHNPLLEEEGLYLCEASNALGNASTSATFNGQATVLAIAPSHTLQEGTEANLTCNVSREAAGSPANFSWFRNGVLWAQGPLETVTLLPVARTDAALYACRILTEAGAQLSTPVLLSVLYPPDRPKLSALLDMGQGHMALFICTVDSRPLALLALFHGEHLLATSLGPQVPSHGRFQAKAEANSLKLEVRELGLGDSGSYRCEATNVLGSSNTSLFFQVRGAWVQVSPSPELQEGQAVVLSCQVHTGVPEGTSYRWYRDGQPLQESTSATLRFAAITLTQAGAYHCQAQAPGSATTSLAAPISLHVSYAPRHVTLTTLMDTGPGRLGLLLCRVDSDPPAQLRLLHGDRLVASTLQGVGGPEGSSPRLHVAVAPNTLRLEIHGAMLEDEGVYICEASNTLGQASASADFDAQAVNVQVWPGATVREGQLVNLTCLVWTTHPAQLTYTWYQDGQQRLDAHSIPLPNVTVRDATSYRCGVGPPGRAPRLSRPITLDVLYAPRNLRLTYLLESHGGQLALVLCTVDSRPPAQLALSHAGRLLASSTAASVPNTLRLELRGPQPRDEGFYSCSARSPLGQANTSLELRLEGVRVILAPEAAVPEGAPITVTCADPAAHAPTLYTWYHNGRWLQEGPAASLSFLVATRAHAGAYSCQAQDAQGTRSSRPAALQVLYAPQDAVLSSFRDSRARSMAVIQCTVDSEPPAELALSHDGKVLATSSGVHSLASGTGHVQVARNALRLQVQDVPAGDDTYVCTAQNLLGSISTIGRLQVEGARVVAEPGLDVPEGAALNLSCRLLGGPGPVGNSTFAWFWNDRRLHAEPVPTLAFTHVARAQAGMYHCLAELPTGAAASAPVMLRVLYPPKTPTMMVFVEPEGGLRGILDCRVDSEPLASLTLHLGSRLVASSQPQGAPAEPHIHVLASPNALRVDIEALRPSDQGEYICSASNVLGSASTSTYFGVRALHRLHQFQQLLWVLGLLVGLLLLLLGLGACYTWRRRRVCKQSMGENSVEMAFQKETTQLIDPDAATCETSTCAPPLG

SEQ ID NO: 169 - DNA, 1958 bp, Homo sapiens
cggcacagcctcacacctgaacgctgtcctcccgcagacgagaccggcgggcactgcaaagctgggactcgtctttgaaggaaaaaaaatagcgagtaagaaatccagcaccattcttcactgacccatcccgctgcacctcttgtttcccaagtttttgaaagctggcaactctgacctcggtgtccaaaaatcgacagccactgagaccggctttgagaagccgaagatttggcagtttccagactgagcaggacaaggtgaaagcaggttggaggcgggtccaggacatctgagggctgaccctgggggctcgtgaggctgccaccgctgctgccgctacagacccagccttgcactccaaggctgcgcaccgccagccactatcatgtccactcccggggtcaattcgtccgcctccttgagccccgaccggctgaacagcccagtgaccatcccggcggtgatgttcatcttcggggtggtgggcaacctggtggccatcgtggtgctgtgcaagtcgcgcaaggagcagaaggagacgaccttctacacgctggtatgtgggctggctgtcaccgacctgttgggcactttgttggtgagcccggtgaccatcgccacgtacatgaagggccaatggcccgggggccagccgctgtgcgagtacagcaccttcattctgctcttcttcagcctgtccggcctcagcatcatctgcgccatgagtgtcgagcgctacctggccatcaaccatgcctatttctacagccactacgtggacaagcgattggcgggcctcacgctctttgcagtctatgcgtccaacgtgctcttttgcgcgctgcccaacatgggtctcggtagctcgcggctgcagtacccagacacctggtgcttcatcgactggaccaccaacgtgacggcgcacgccgcctactcctacatgtacgcgggcttcagctccttcctcattctcgccaccgtcctctgcaacgtgcttgtgtgcggcgcgctgctccgcatgcaccgccagttcatgcgccgcacctcgctgggcaccgagcagcaccacgcggccgcggccgcctcggttgcctcccggggccaccccgctgcctccccagccttgccgcgcctcagcgactttcggcgccgccggagcttccgccgcatcgcgggcgccgagatccagatggtcatcttactcattgccacctccctggtggtgctcatctgctccatcccgctcgtggtgcgagtattcgtcaaccagttatatcagccaagtttggagcgagaagtcagtaaaaatccagatttgcaggccatccgaattgcttctgtgaaccccatcctagacccctggatatatatcctcctgagaaagacagtgctcagtaaagcaatagagaagatcaaatgcctcttctgccgcattggcgggtcccgcagggagcgctccggacagcactgctcagacagtcaaaggacatcttctgccatgtcaggccactctcgctccttcatctcccgggagctgaaggagatcagcagtacatctcagaccctcctgccagacctctcactgccagacctcagtgaaaatggccttggaggcaggaatttgcttccaggtgtgcctggcatgggcctggcccaggaagacaccacctcactgaggactttgcgaatatcagagacctcagactcttcacagggtcaggactcagagagtgtcttactggtggatgaggctggtgggagcggcagggctgggcctgcccctaaggggagctccctgcaagtcacatttcccagtgaaacactgaacttatcagaaaaatgtatataataggcaaggaaagaaatacagtactgtttctggacccttataaaatcctgtgcaatagacacatacatgtcacatttagctgtgctcagaagggctatcatca

SEQ ID NO: 170 - protein, 488 aa, Homo sapiens
MSTPGVNSSASLSPDRLNSPVTIPAVMFIFGVVGNLVAIVVLCKSRKEQKETTFYTLVCGLAVTDLLGTLLVSPVTIATYMKGQWPGGQPLCEYSTFILLFFSLSGLSIICAMSVERYLAINHAYFYSHYVDKRLAGLTLFAVYASNVLFCALPNMGLGSSRLQYPDTWCFIDWTTNVTAHAAYSYMYAGFSSFLILATVLCNVLVCGALLRMHRQFMRRTSLGTEQHHAAAAASVASRGHPAASPALPRLSDFRRRRSFRRIAGAEIQMVILLIATSLVVLICSIPLVVRVFVNQLYQPSLEREVSKNPDLQAIRIASVNPILDPWIYILLRKTVLSKAIEKIKCLFCRIGGSRRERSGQHCSDSQRTSSAMSGHSRSFISRELKEISSTSQTLLPDLSLPDLSENGLGGRNLLPGVPGMGLAQEDTTSLRTLRISETSDSSQGQDSESVLLVDEAGGSGRAGPAPKGSSLQVTFPSETLNLSEKCI

SEQ ID NO: 171 - DNA, 2681 bp, Homo sapiens
ctctctggataggaagaaatatagtagaaccctttgaaaatggatattttcacatattttcgttcagatacaaaagctggcagttactgaaataaggacttgaagttccttcctctttttttatgtcttaagagcaggaaataaagagacagctgaaggtgtagccttgaccaactgaaagggaaatcttcatcctctgaaaaaacatatgtgattctcaaaaaacgcatctggaaaattgataaagaagcgattctgtagattctcccagcgctgttgggctctcaattccttctgtgaaggacaacatatggtgatggggaaatcagaagctttgagaccctctacacctggatatgaatcccccttctaatacttaccagaaatgaaggggatactcagggcagagttctgaatctcaaaacactctactctggcaaaggaatgaagttattggagtgatgacaggaacacgggagaacaatgctctgtttgggctggatatttctttggcttgttgcaggagagcgaattaaaggatttaatatttcaggttgttccacaaaaaaactcctttggacatattctacaaggagtgaagaggaatttgtcttattttgtgatttaccagagccacagaaatcacatttctgccacagaaatcgactctcaccaaaacaagtccctgagcacctgcccttcatgggtagtaacgacctatctgatgtccaatggtaccaacaaccttcgaatggagatccattagaggacattaggaaaagctatcctcacatcattcaggacaaatgtacccttcactttttgaccccaggggtgaataattctgggtcatatatttgtagacccaagatgattaagagcccctatgatgtagcctgttgtgtcaagatgattttagaagttaagccccagacaaatgcatcctgtgagtattccgcatcacataagcaagacctacttcttgggagcactggctctatttcttgccccagtctcagctgccaaagtgatgcacaaagtccagcggtaacctggtacaagaatggaaaactcctctctgtggaaaggagcaaccgaatcgtagtggatgaagtttatgactatcaccagggcacatatgtatgtgattacactcagtcggatactgtgagttcgtggacagtcagagctgttgttcaagtgagaaccattgtgggagacactaaactcaaaccagatattctggatcctgtcgaggacacactggaagtagaacttggaaagcctttaactattagctgcaaagcacgatttggctttgaaagggtctttaaccctgtcataaaatggtacatcaaagattctgacctagagtgggaagtctcagtacctgaggcgaaaagtattaaatccactttaaaggatgaaatcattgagcgtaatatcatcttggaaaaagtcactcagcgtgatcttcgcaggaagtttgtttgctttgtccagaactccattggaaacacaacccagtccgtccaactgaaagaaaagagaggagtggtgctcctgtacatcctgcttggcaccatcgggaccctggtggccgtgctggcggcgagtgccctcctctacaggcactggattgaaatagtgctgctgtaccggacctaccagagcaaggatcagacgcttggggataaaaaggattttgatgctttcgtatcctatgcaaaatggagctcttttccaagtgaggccacttcatctctgagtgaagaacacttggccctgagcctatttcctgatgttttagaaaacaaatatggatatagcctgtgtttgcttgaaagagatgtggctccaggaggagtgtatgcagaagacattgtgagcattattaagagaagcagaagaggaatatttatcttgagccccaactatgtcaatggacccagtatctttgaactacaagcagcagtgaatcttgccttggatgatcaaacactgaaactcattttaattaagttctgttacttccaagagccagagtctctacctcatctcgtgaaaaaagctctcagggttttgcccacagttacttggagaggcttaaaatcagttcctcccaattctaggttctgggccaaaatgcgctaccacatgcctgtgaaaaactctcagggattcacgtggaaccagctcagaattacctctaggatttttcagtggaaaggactcagtagaacagaaaccactgggaggagctcccagcctaaggaatggtgaaatgagccctggagccccctccagtccagtccctgggatagagatgttgctggacagaactcacagctctgtgtgtgtgtgttcaggctgataggaaattcaaagagtctcctgccagcaccaagcaagcttgatggacaatggaatgggattgagactgtggtttagagcctttgatttcctggactggacagacggcgagtgaattctctagaccttgggtactttcagtacacaacacccctaagatttcccagtggtccgagcagaatcagaaaatacagctacttctgccttatggctagggaactgtcatgtctaccatgtattgtacatatgactttatgtatacttgcaatcaaataaatattattttattagaaaaaaaaccggaattc

SEQ ID NO: 172 - protein, 599 aa, Homo sapiens
MLCLGWIFLWLVAGERIKGFNISGCSTKKLLWTYSTRSEEEFVLFCDLPEPQKSHFCHRNRLSPKQVPEHLPFMGSNDLSDVQWYQQPSNGDPLEDIRKSYPHIIQDKCTLHFLTPGVNNSGSYICRPKMIKSPYDVACCVKMILEVKPQTNASCEYSASHKQDLLLGSTGSISCPSLSCQSDAQSPAVTWYKNGKLLSVERSNRIVVDEVYDYHQGTYVCDYTQSDTVSSWTVRAVVQVRTIVGDTKLKPDILDPVEDTLEVELGKPLTISCKARFGFERVFNPVIKWYIKDSDLEWEVSVPEAKSIKSTLKDEIIERNIILEKVTQRDLRRKFVCFVQNSIGNTTQSVQLKEKRGVVLLYILLGTIGTLVAVLAASALLYRHWIEIVLLYRTYQSKDQTLGDKKDFDAFVSYAKWSSFPSEATSSLSEEHLALSLFPDVLENKYGYSLCLLERDVAPGGVYAEDIVSIIKRSRRGIFILSPNYVNGPSIFELQAAVNLALDDQTLKLILIKFCYFQEPESLPHLVKKALRVLPTVTWRGLKSVPPNSRFWAKMRYHMPVKNSQGFTWNQLRITSRIFQWKGLSRTETTGRSSQPKEW

SEQ ID NO: 173 - DNA, 1935 bp, Homo sapiens
agaccaaggagtggaaagttctccggcagccctgagatctcaagagtgacatttgtgagaccagctaatttgattaaaattctcttggaatcagctttgctagtatcatacctgtgccagatttcatcatgggaaacagctgttacaacatagtagccactctgttgctggtcctcaactttgagaggacaagatcattgcaggatccttgtagtaactgcccagctggtacattctgtgataataacaggaatcagatttgcagtccctgtcctccaaatagtttctccagcgcaggtggacaaaggacctgtgacatatgcaggcagtgtaaaggtgttttcaggaccaggaaggagtgttcctccaccagcaatgcagagtgtgactgcactccagggtttcactgcctgggggcaggatgcagcatgtgtgaacaggattgtaaacaaggtcaagaactgacaaaaaaaggttgtaaagactgttgctttgggacatttaacgatcagaaacgtggcatctgtcgaccctggacaaactgttctttggatggaaagtctgtgcttgtgaatgggacgaaggagagggacgtggtctgtggaccatctccagccgacctctctccgggagcatcctctgtgaccccgcctgcccctgcgagagagccaggacactctccgcagatcatctccttctttcttgcgctgacgtcgactgcgttgctcttcctgctgttcttcctcacgctccgtttctctgttgttaaacggggcagaaagaaactcctgtatatattcaaacaaccatttatgagaccagtacaaactactcaagaggaagatggctgtagctgccgatttccagaagaagaagaaggaggatgtgaactgtgaaatggaagtcaatagggctgttgggactttcttgaaaagaagcaaggaaatatgagtcatccgctatcacagctttcaaaagcaagaacaccatcctacataatacccaggattcccccaacacacgttcttttctaaatgccaatgagttggcctttaaaaatgcaccactttttttttttttttgacagggtctcactctgtcacccaggctggagtgcagtggcaccaccatggctctctgcagccttgacctctgggagctcaagtgatcctcctgcctcagtctcctgagtagctggaactacaaggaagggccaccacacctgactaacttttttgttttttgtttggtaaagatggcatttcaccatgttgtacaggctggtctcaaactcctaggttcactttggcctcccaaagtgctgggattacagacatgaactgccaggcccggccaaaataatgcaccacttttaacagaacagacagatgaggacagagctggtgataaaaaaaaaaaaaaaaaagcattttctagataccacttaacaggtttgagctagtttttttgaaatccaaagaaaattatagtttaaattcaattacatagtccagtggtccaactataattataatcaaaatcaatgcaggtttgttttttggtgctaatatgacatatgacaataagccacgaggtgcagtaagtacccgactaaagtttccgtgggttctgtcatgtaacacgacatgctccaccgtcaggggggagtatgagcagagtgcctgagtttagggtcaaggacaaaaaacctcaggcctggaggaagttttggaaagagttcaagtgtctgtatatcctatggtcttctccatcctcacaccttctgcctttgtcctgctcccttttaagccaggttacattctaaaaattcttaacttttaacataatattttataccaaagccaataaatgaactgcatatgaaaaaaaaaaaaaaaaaaaaaaaaaaaaaaaaaaaaaaaaaaaaaaaaaaaa

SEQ ID NO: 174 - protein, 255 aa, Homo sapiens
MGNSCYNIVATLLLVLNFERTRSLQDPCSNCPAGTFCDNNRNQICSPCPPNSFSSAGGQRTCDICRQCKGVFRTRKECSSTSNAECDCTPGFHCLGAGCSMCEQDCKQGQELTKKGCKDCCFGTFNDQKRGICRPWTNCSLDGKSVLVNGTKERDVVCGPSPADLSPGASSVTPPAPAREPGHSPQIISFFLALTSTALLFLLFFLTLRFSVVKRGRKKLLYIFKQPFMRPVQTTQEEDGCSCRFPEEEEGGCEL

SEQ ID NO: 175 - DNA, 2157 bp, Homo sapiens
atgagagctgtactggacacagcagacattgccatagtggccctgtattttatcctggtcatgtgcattggtttttttgccatgtggaaatgtaatagaagcaccgtgagtggatacttcctggcggggcgctctatgacctgggtaacaattggtgcctctctgtttgtgagcaatattgggagtgagcacttcattgggctggcaggatctggagctgcaagtggatttgcagtgggcgcatgggaattcaatgccttactgcttttacaacttctgggatgggttttcatcccaatttacatccggtcaggggtatataccatgcctgaatacttgtccaagcgatttggtggccataggattcaggtctattttgcagccttgtctctgattctctatattttcaccaagctctcggtggatctgtattcgggtgccctttttatccaggagtctttgggttggaatctttatgtgtctgtcatcctgctcattggcatgactgctttgctgactgtcaccggaggccttgttgcagtgatctacacagacactctgcaggctctgctcatgatcattggggcacttacacttatgattattagcataatggagattggcgggtttgaggaagttaagagaaggtacatgttggcctcacccgatgtcacttccatcttattgacatacaacctttccaacacaaattcttgtaatgtctcccctaagaaagaagccctgaaaatgctgcggaatccaacagatgaagatgttccttggcctggattcattcttgggcagaccccagcttcagtatggtactggtgtgctgaccaagtcatcgtgcagagggtccttgcagccaaaaacattgctcatgccaaaggctctactcttatggctggcttcttaaagctcctgccaatgtttatcatagttgtcccaggaatgatttccaggatactgtttactgatgatatagcttgcatcaacccagagcactgcatgctggtgtgtggaagcagagctggttgctccaatattgcttacccacgcctggtgatgaagctggttcctgtgggccttcggggtttaatgatggcagtgatgattgcagctctgatgagtgacttagactctatctttaacagtgccagtaccatattcaccctcgatgtgtacaaacttatccgcaagagcgcaagctcccgggagttaatgattgtggggaggatatttgtggcatttatggtggtgatcagcatagcatgggtgccaatcatcgtggagatgcaaggaggccagatgtacctttacattcaggaggtagcagattacctgacacccccagtggcagccttgttcctgctggcaattttctggaagcgctgcaatgaacaaggggctttctatggtggaatggctggctttgttcttggagcagtccgtttgatactggcctttgcctaccgtgccccagaatgtgaccaacctgataataggccgggcttcatcaaagacatccattatatgtatgtggccacaggattgttttgggtcacgggactcattactgtaattgtgagccttctcacaccacctcccacaaaggaacagattcgaaccaccaccttttggtctaagaagaacctggtggtgaaggagaactgctccccaaaagaggaaccataccaaatgcaagaaaagagcattctgagatgcagtgagaataatgagaccatcaaccacatcattcccaacgggaaatctgaagacagcattaagggccttcagcctgaagatgttaatctgttggtaacctgcagagaggagggcaacccagtggcatccttaggtcattcagaggcagaaacaccagttgacgcttactccaatgggcaagcagctctcatgggtgagaaagagagaaagaaagaaacggatgatggaggtcggtactggaagttcatagactggttttgtggctttaaaagtaagagcctcagcaagaggagtctcagagacctgatggaagaggaggctgtttgtttacagatgctagaagagactcggcaagttaaagtaatactaaatattggactttttgctgtgtgttcacttggaattttcatgtttgtttatttctccttatga

SEQ ID NO: 176 - protein, 718 aa, Homo sapiens
MRAVLDTADIAIVALYFILVMCIGFFAMWKCNRSTVSGYFLAGRSMTWVTIGASLFVSNIGSEHFIGLAGSGAASGFAVGAWEFNALLLLQLLGWVFIPIYIRSGVYTMPEYLSKRFGGHRIQVYFAALSLILYIFTKLSVDLYSGALFIQESLGWNLYVSVILLIGMTALLTVTGGLVAVIYTDTLQALLMIIGALTLMIISIMEIGGFEEVKRRYMLASPDVTSILLTYNLSNTNSCNVSPKKEALKMLRNPTDEDVPWPGFILGQTPASVWYWCADQVIVQRVLAAKNIAHAKGSTLMAGFLKLLPMFIIVVPGMISRILFTDDIACINPEHCMLVCGSRAGCSNIAYPRLVMKLVPVGLRGLMMAVMIAALMSDLDSIFNSASTIFTLDVYKLIRKSASSRELMIVGRIFVAFMVVISIAWVPIIVEMQGGQMYLYIQEVADYLTPPVAALFLLAIFWKRCNEQGAFYGGMAGFVLGAVRLILAFAYRAPECDQPDNRPGFIKDIHYMYVATGLFWVTGLITVIVSLLTPPPTKEQIRTTTFWSKKNLVVKENCSPKEEPYQMQEKSILRCSENNETINHIIPNGKSEDSIKGLQPEDVNLLVTCREEGNPVASLGHSEAETPVDAYSNGQAALMGEKERKKETDDGGRYWKFIDWFCGFKSKSLSKRSLRDLMEEEAVCLQMLEETRQVKVILNIGLFAVCSLGIFMFVYFSL

SEQ ID NO: 177 - DNA, 2208 bp, Homo sapiens
gaattcatgctaaattgctggaaggctgcgtctctgctgtggtgtcagttccggatgcctcatcgccaggggcgcgccgcagccacccaccctccggaccgcggcagctgctgacccgccatcgccatggcccgcgggaaagccaaggaggagggcagctggaagaaattcatctggaactcagagaagaaggagtttctgggcaggaccggtggcagttggtttaagatccttctattctacgtaatattttatggctgcctggctggcatcttcatcggaaccatccaagtgatgctgctcaccatcagtgaatttaagcccacatatcaggaccgagtggccccgccaggattaacacagattcctcagatccagaagactgaaatttcctttcgtcctaatgatcccaagagctatgaggcatatgtactgaacatagttaggttcctggaaaagtacaaagattcagcccagagggatgacatgatttttgaagattgtggcgatgtgcccagtgaaccgaaagaacgaggagactttaatcatgaacgaggagagcgaaaggtctgcagattcaagcttgaatggctgggaaattgctctggattaaatgatgaaacttatggctacaaagagggcaaaccgtgcattattataaagctcaaccgagttctaggcttcaaacctaagcctcccaagaatgagtccttggagacttacccagtgatgaagtataacccaaatgtccttcccgttcagtgcactggcaagcgagatgaagataaggataaagttggaaatgtggagtattttggactgggcaactcccctggttttcctctgcagtattatccgtactatggcaaactcctgcagcccaaatacctgcagcccctgctggccgtacagttcaccaatcttaccatggacactgaaattcgcatagagtgtaaggcgtacggtgagaacattgggtacagtgagaaagaccgttttcagggacgttttgatgtaaaaattgaagttaagagctgatcacaagcacaaatctttcccactagccatttaataagttaaaaaaagatacaaaaacaaaaacctactagtcttgaacaaactgtcatacgtatgggacctacacttaatctatatgctttacactagctttctgcatttaataggttagaatgtaaattaaagtgtagcaatagcaacaaaatatttattctactgtaaatgacaaaagaaaaagaaaaattgagccttgggacgtgcccatttttactgtaaattatgattccgtaactgaccttgtagtaagcagtgtttctggcccctaagtattgctgccttgtgtattttatttagtgtacagtactacaggtgcatactctggtcatttttcaagccatgttttattgtatctgttttctactttatgtgagcaaggtttgctgtccaaggtgtaaatattcaacgggaataaaactggcatggtaattttttttttttgtttgttttttgttttttggctctttcaaaggtaatggcccatcgatgagcatttttaacatactccatagtcttttcctgtggtgttaggtctttatttttatttttttcctgggggctggggtgggggtttgtcatgggggaactgccctttaaattttaagtgacactacagaaaaacacaaaaaggtgatgggttgtgttatgcttgtattgaatgctgtcttgacatctcttgccttgtcctccggtatgttctaaagctgtgtctgagatctggatctgcccatcactttggcctagggacagggctaattaatttgctttatacattttcttttactttccttttttcctttctggaggcatcacatgctggtgctgtgtctttatgaatgttttaaccattttcatggtggaagaattttatatttatgcagttgtacaattttatttttttctgcaagaaaaagtgtaatgtatgaaataaaccaaagtcacttgtttgaaaataaatctttattttgaactttataaaagcaatgcagtaccccatagactggtgttaaatgttgtctacagtgcaaaatccatgttctaacatatgtaataattgccaggagtacagtgctcttgttgatcttgtattcagtcaggttaaaacaacggacaataaaagaatgaaccgaattc

SEQ ID NO: 178 - protein, 303 aa, Homo sapiens
MARGKAKEEGSWKKFIWNSEKKEFLGRTGGSWFKILLFYVIFYGCLAGIFIGTIQVMLLTISEFKPTYQDRVAPPGLTQIPQIQKTEISFRPNDPKSYEAYVLNIVRFLEKYKDSAQRDDMIFEDCGDVPSEPKERGDFNHERGERKVCRFKLEWLGNCSGLNDETYGYKEGKPCIIIKLNRVLGFKPKPPKNESLETYPVMKYNPNVLPVQCTGKRDEDKDKVGNVEYFGLGNSPGFPLQYYPYYGKLLQPKYLQPLLAVQFTNLTMDTEIRIECKAYGENIGYSEKDRFQGRFDVKIEVKS

SEQ ID NO: 179 - DNA, 1012 bp, Homo sapiens
ttcctttcaaatacacaccccaacccgccccggcatacacagaaatggggactgcgagcagaagcaacatcgctcgccatctgcaaaccaatctcattctattttgtgtcggtgctgtgggcgcctgtactctctctgtcacacaaccgtggtacctagaagtggactacactcatgaggccgtcaccataaagtgtaccttctccgcaaccggatgcccttctgagcaaccaacatgcctgtggtttcgctacggtgctcaccagcctgagaacctgtgcttggacgggtgcaaaagtgaggcagacaagttcacagtgagggaggccctcaaagaaaaccaagtttccctcactgtaaacagagtgacttcaaatgacagtgcaatttacatctgtggaatagcattccccagtgtgccggaagcgagagctaaacagacaggaggagggaccacactggtggtaagagaaattaagctgctcagcaaggaactgcggagcttcctgacagctcttgtatcactgctctctgtctatgtgaccggtgtgtgcgtggccttcatactcctctccaaatcaaaatccaaccctctaagaaagaaagaaataaaagaagactcacaaaagaagaagagtgctcggcgtatttttcaggaaattgctcaagaactataccataagagacatgtggaaacaaatcagcaatctgagaaagataacaacacttatgaaaacagaagagtactttccaactatgaaaggccatagaaacgttttaattttcaatgaagtcactgaaaatccaactccaggagctatggcagtgttaatgaacatatatcatcaggtcttaaaaaaaaaataaaggtaaactgaaaagacaactggctacaaagaaggatgtcagaatgtaaggaaactataactaatagtcattaccaaaatactaaaacccaacaaaatgcaactgaaaaataccttccaaatttgccaagaaaaaaaattctatt

SEQ ID NO: 180 - protein, 241 aa, Homo sapiens
MGTASRSNIARHLQTNLILFCVGAVGACTLSVTQPWYLEVDYTHEAVTIKCTFSATGCPSEQPTCLWFRYGAHQPENLCLDGCKSEADKFTVREALKENQVSLTVNRVTSNDSAIYICGIAFPSVPEARAKQTGGGTTLVVREIKLLSKELRSFLTALVSLLSVYVTGVCVAFILLSKSKSNPLRKKEIKEDSQKKKSARRIFQEIAQELYHKRHVETNQQSEKDNNTYENRRVLSNYERP

SEQ ID NO: 181 - DNA, 2958 bp, Homo sapiens
ggcacgagggtgtgcgtgatggagaaaattgggcaccagggctgctcccgagattctcagatctgatttccacgcttgctaccaaaatagtctgggcaggccacttttggaagtaggcgttatctagtgagcaggcggccgctttcgatttcgctttcccctaaatggctgagcttctcgccagcgcaggatcagcctgttcctgggactttccgagagccccgccctcgttccctcccccagccgccagtaggggaggactcggcggtacccggagcttcaggccccaccggggcgcggagagtcccagacccggccgggaccgggacggcgtccgagtgccaatggctagctctaggtgtcccgctccccgcgggtgccgctgcctccccggagcttctctcgcatggctggggacagtactgctacttctcgccgactgggtgctgctccggaccgcgctgccccgcatattctccctgctggtgcccaccgcgctgccactgctccgggtctgggcggtgggcctgagccgctgggccgtgctctggctgggggcctgcggggtcctcagggcaacggttggctccaagagcgaaaacgcaggtgcccagggctggctggctgctttgaagccattagctgcggcactgggcttggccctgccgggacttgccttgttccgagagctgatctcatggggagcccccgggtccgcggatagcaccaggctactgcactggggaagtcaccctaccgccttcgttgtcagttatgcagcggcactgcccgcagcagccctgtggcacaaactcgggagcctctgggtgcccggcggtcagggcggctctggaaaccctgtgcgtcggcttctaggctgcctgggctcggagacgcgccgcctctcgctgttcctggtcctggtggtcctctcctctcttggggagatggccattccattctttacgggccgcctcactgactggattctacaagatggctcagccgataccttcactcgaaacttaactctcatgtccattctcaccatagccagtgcagtgctggagttcgtgggtgacgggatctataacaacaccatgggccacgtgcacagccacttgcagggagaggtgtttggggctgtcctgcgccaggagacggagtttttccaacagaaccagacaggtaacatcatgtctcgggtaacagaggacacgtccaccctgagtgattctctgagtgagaatctgagcttatttctgtggtacctggtgcgaggcctatgtctcttggggatcatgctctggggatcagtgtccctcaccatggtcaccctgatcaccctgcctctgcttttccttctgcccaagaaggtgggaaaatggtaccagttgctggaagtgcaggtgcgggaatctctggcaaagtccagccaggtggccattgaggctctgtcggccatgcctacagttcgaagctttgccaacgaggagggcgaagcccagaagtttagggaaaagctgcaagaaataaagacactcaaccagaaggaggctgtggcctatgcagtcaactcctggaccactagtatttcaggtatgctgctgaaagtgggaatcctctacattggtgggcagctggtgaccagtggggctgtaagcagtgggaaccttgtcacatttgttctctaccagatgcagttcacccaggctgtggaggtactgctctccatctaccccagagtacagaaggctgtgggctcctcagagaaaatatttgagtacctggaccgcacccctcgctgcccacccagtggtctgttgactcccttacacttggagggccttgtccagttccaagatgtctcctttgcctacccaaaccgcccagatgtcttagtgctacaggggctgacattcaccctacgccctggcgaggtgacggcgctggtgggacccaatgggtctgggaagagcacagtggctgccctgctgcagaatctgtaccagcccaccgggggacagctgctgttggatgggaagccccttccccaatatgagcaccgctacctgcacaggcaggtggctgcagtgggacaagagccacaggtatttggaagaagtcttcaagaaaatattgcctatggcctgacccagaagccaactatggaggaaatcacagctgctgcagtaaagtctggggcccatagtttcatctctggactccctcagggctatgacacagaggtagacgaggctgggagccagctgtcagggggtcagcgacaggcagtggcgttggcccgagcattgatccggaaaccgtgtgtacttatcctggatgatgccaccagtgccctggatgcaaacagccagttacaggtggagcagctcctgtacgaaagccctgagcggtactcccgctcagtgcttctcatcacccagcacctcagcctggtggagcaggctgaccacatcctctttctggaaggaggcgctatccgggaggggggaacccaccagcagctcatggagaaaaaggggtgctactgggccatggtgcaggctcctgcagatgctccagaatgaaagccttctcagacctgcgcactccatctccctcccttttcttctctctgtggtggagaaccacagctgcagagtagcagctgcctccaggatgagttacttgaaatttgccttgagtgtgttacctcctttccaagctcctcgtgataatgcagacttcctggagtacaaacacaggatttgtaattcctactgtaacggagtttagagccagggctgatgctttggtgtggccagcactctgaaactgagaaatgttcagaatgtacggaaagatgatcagctattttcaacataactgaaggcatatgctggcccataaacaccctgtaggttcttgatatttataataaaattggtgttttgt

SEQ ID NO: 182 - protein, 808 aa, Homo sapiens
MAELLASAGSACSWDFPRAPPSFPPPAASRGGLGGTRSFRPHRGAESPRPGRDRDGVRVPMASSRCPAPRGCRCLPGASLAWLGTVLLLLADWVLLRTALPRIFSLLVPTALPLLRVWAVGLSRWAVLWLGACGVLRATVGSKSENAGAQGWLAALKPLAAALGLALPGLALFRELISWGAPGSADSTRLLHWGSHPTAFVVSYAAALPAAALWHKLGSLWVPGGQGGSGNPVRRLLGCLGSETRRLSLFLVLVVLSSLGEMAIPFFTGRLTDWILQDGSADTFTRNLTLMSILTIASAVLEFVGDGIYNNTMGHVHSHLQGEVFGAVLRQETEFFQQNQTGNIMSRVTEDTSTLSDSLSENLSLFLWYLVRGLCLLGIMLWGSVSLTMVTLITLPLLFLLPKKVGKWYQLLEVQVRESLAKSSQVAIEALSAMPTVRSFANEEGEAQKFREKLQEIKTLNQKEAVAYAVNSWTTSISGMLLKVGILYIGGQLVTSGAVSSGNLVTFVLYQMQFTQAVEVLLSIYPRVQKAVGSSEKIFEYLDRTPRCPPSGLLTPLHLEGLVQFQDVSFAYPNRPDVLVLQGLTFTLRPGEVTALVGPNGSGKSTVAALLQNLYQPTGGQLLLDGKPLPQYEHRYLHRQVAAVGQEPQVFGRSLQENIAYGLTQKPTMEEITAAAVKSGAHSFISGLPQGYDTEVDEAGSQLSGGQRQAVALARALIRKPCVLILDDATSALDANSQLQVEQLLYESPERYSRSVLLITQHLSLVEQADHILFLEGGAIREGGTHQQLMEKKGCYWAMVQAPADAPE

SEQ ID NO: 183 - DNA, 3246 bp, Homo sapiens
  misc_feature (2530)..(2530): wherein "n" equals a, c, g, or t.
agtgtggttttagtttttcctaagaagtggcgtggtttggggctttatatccgggaggagcatatgtacgcaaatcctggggcgtttgcaaacccggatccggggcgtctggccccatgcccggccgggcgtttgagggctactgccacgcagcgtttctggagcctgccggctggtgccctggtggcctttatctctgtccccctttgtcctctttatctcaggctctccaggaggccggggggcccactccgcctatcgctcccctcggctacgctgccactccaatgccccgcaggtcgcgagctgctgttctttcgaaggcgccggagaaccaggggcgtcccgcgccacctctgactcggagcagcgccgagcactgacgctcccgcccttgggcaaggacgccagtgcgcccgcgcgcgtccctctgcgcggcagcccgtcgcgggccctcaaggggaagcccaggccaggatggccccgggtcgcgcggtggccgggctcctgttgctggcggccgccggcctcggaggagtggcggaggggccagggctagccttcagcgaggatgtgctgagcgtgttcggcgcgaatctgagcctgtcggcggcgcagctccagcacttgctggagcagatgggagccgcctcccgcgtgggcgtcccggagcctggccagctgcacttcaaccagtgtttaactgctgaagagatcttttcccttcatggcttttcaaatgctacccaaataaccagctccaaattctctgtcatctgtccagcagtcttacagcaattgaactttcacccatgtgaggatcggcccaagcacaaaacaagaccaagtcattcagaagtttggggatatggattcctgtcagtgacgattattaatctggcatctctcctcggattgattttgactccactgataaagaaatcttatttcccaaagattttgaccttttttgtggggctggctattgggactcttttttcaaatgcaattttccaacttattccagaggcatttggatttgatcccaaagtcgacagttatgttgagaaggcagttgctgtgtttggtggattttacctacttttcttttttgaaagaatgctaaagatgttattaaagacatatggtcagaatggtcatacccactttggaaatgataactttggtcctcaagaaaaaactcatcaacctaaagcattacctgccatcaatggtgtgacatgctatgcaaatcctgctgtcacagaagctaatggacatatccattttgataatgtcagtgtggtatctctacaggatggaaaaaaagagccaagttcatgtacctgtttgaaggggcccaaactgtcagaaatagggacgattgcctggatgataacgctctgcgatgccctccacaatttcatcgatggcctggcgattggggcttcctgcaccttgtctctccttcagggactcagtacttccatagcaatcctatgtgaggagtttccccacgagttaggagactttgtgatcctactcaatgcagggatgagcactcgacaagccttgctattcaacttcctttctgcatgttcctgctatgttgggctagcttttggcattttggtgggcaacaatttcgctccaaatattatatttgcacttgctggaggcatgttcctctatatttctctggcagatatgtttccagagatgaatgatatgctgagagaaaaggtaactggaagaaaaaccgatttcaccttcttcatgattcagaatgctggaatgttaactggattcacagccattctactcattaccttgtatgcaggagaaatcgaattggagtaatagaaaatggaagatggtgttgttaataaaggcatttaatagataaaaacatctccaaaaaggattttgaagctgatcctatttagttaaaaagataattttgctttcaactgtaggtccagaaaactaattattggcatcagtctgtgaaatagtccattatttgttgttaaaaatgcttcaaaaggttttcagtgtcagtctgagatgcctggtatataggagcctttgggaaatacttatttttcagtattccatgcatattagatatcaccatgaagcaagagacatgcattctataatcatgtagacactcagactcaggggaaaatacaagttatatcctgaaagcctttaaaactctatggtaggatcaaagattcaaatggtttcagagaggttttatttcaattaatttgttctagtgctttcaagagcaagtacatcaaaatgtagaaggtaaaatgtatgcaacactaatataaattattccaagtctttaaggagccaaagaaaaaaaagatttctcacagctttttgttctgttttgtatttcaattaggaacttgcagtattattttgaaaaccattctaaaataataggagttaggaaataaataaagttttgctagccctgctaagttcaggcttagaggcttatcgctaagtntaaacttcaccagattccacgaaaagctggatagctttttttctgacttatgttgtggttgcacccctcacaaatggcagaacagtatgtaaagctggtaacacctcggtttcagtgcaccatgtgtttgctttgtgaaggtgaagaatatgttggtttagagaaagaaattggatgtaattttatgcaatttacttttaaagacaaacataactatttagcagagaatattttaataaatgcaaaacaacagctggactgctgtacatcaaggacagattaactggaaaacatatgttccttatgtgtgattgagagccattcagaaaagacttcctttgtgttcagcctatacttttccatatggtataccttgaaaaaaattagcacaccatggttatttttctaccttttataaaagacagagcctgtttactcatttagaagatagagaaaattggtctaaaattgaacatcctagattcacactcccaagtcacttaaggtgatttgatggtgaggaaaatgattgacaaagcccaacaatgatctcaggaattacattttccaacagaccaaaaaatgttttcatgtagcagcaatgcagatttggtgaatatttaatatatattttagtatgtatttcactttatgactgacaattaaaaaatattgtttggccaaatagtaaacacccttttgaaaccatgaaaaaa

SEQ ID NO: 184 - protein, 460 aa, Homo sapiens
MAPGRAVAGLLLLAAAGLGGVAEGPGLAFSEDVLSVFGANLSLSAAQLQHLLEQMGAASRVGVPEPGQLHFNQCLTAEEIFSLHGFSNATQITSSKFSVICPAVLQQLNFHPCEDRPKHKTRPSHSEVWGYGFLSVTIINLASLLGLILTPLIKKSYFPKILTFFVGLAIGTLFSNAIFQLIPEAFGFDPKVDSYVEKAVAVFGGFYLLFFFERMLKMLLKTYGQNGHTHFGNDNFGPQEKTHQPKALPAINGVTCYANPAVTEANGHIHFDNVSVVSLQDGKKEPSSCTCLKGPKLSEIGTIAWMITLCDALHNFIDGLAIGASCTLSLLQGLSTSIAILCEEFPHELGDFVILLNAGMSTRQALLFNFLSACSCYVGLAFGILVGNNFAPNIIFALAGGMFLYISLADMFPEMNDMLREKVTGRKTDFTFFMIQNAGMLTGFTAILLITLYAGEIELE

SEQ ID NO: 185 - DNA, 6122 bp, Homo sapiens
cggaggcccgggcaggccggctgagctaactccccagagccaaagtggaaggcgcgccccgagcgccttctccccaggaccccggtgtccctccccgcgccccgagcccgcgctctccttcccccgccctcagagcgctccccgcccctctgtctccccgcagcccgctagacgagccgatggcgcggccccggagagcccgggagccgctgctcgtggcgctgctgccgctggcgtggctggcgcaggcgggcctggcgcgcgcggcgggctctgtgcgcctggcgggcggcctgacgctgggcggcctgttcccggtgcacgcgcggggcgcggcgggccgggcgtgcgggccgctgaagaaggagcagggcgtgcaccggctggaggccatgctgtacgcgctggaccgcgtcaacgccgaccccgagctgctgcccggcgtgcgcctgggcgcgcggctgctggacacctgctcgcgggacacctacgcgctggagcaggcgctgagcttcgtgcaggcgctgatccgcggccgcggcgacggcgacgaggtgggcgtgcgctgcccgggaggcgtccctccgctgcgccccgcgccccccgagcgcgtcgtggccgtcgtgggcgcctcggccagctccgtctccatcatggtcgccaacgtgctgcgcctgtttgcgataccccagatcagctatgcctccacagccccggagctcagcgactccacacgctatgacttcttctcccgggtggtgccacccgactcctaccaggcgcaggccatggtggacatcgtgagggcactgggatggaactatgtgtccacgctggcctccgagggcaactatggcgaaagtggggttgaggccttcgttcagatctcccgagaggctgggggggtctgtattgcccagtctatcaagattcccagggaaccaaagccaggagagttcagcaaggtgatcaggagactcatggagacgcccaacgcccggggcatcatcatctttgccaatgaggatgacatcaggcgggtcctggaggcagctcgccaggccaacctgaccggccacttcctgtgggtcggctcagacagctggggagccaagacctcacccatcttgagcctggaggacgtggccgttggggccatcaccatcctgcccaaaagggcctccatcgacggatttgaccagtacttcatgactcgatccctggagaacaaccgcaggaacatctggttcgccgagttctgggaagagaattttaactgcaaactgaccagctcaggtacccagtcagatgattccacccgcaaatgcacaggcgaggaacgcatcggccgggactccacctacgagcaggagggcaaggtgcagtttgtgattgatgcggtgtatgccattgcccacgccctccacagcatgcaccaggcgctctgccctgggcacacaggcctgtgcccggcgatggaacccaccgatgggcggatgcttctgcagtacattcgagctgtccgcttcaacggcagcgcaggaacccctgtgatgttcaacgagaacggggatgcgcccgggcggtacgacatcttccagtaccaggcgaccaatggcagtgccagcagtggcgggtaccaggcagtgggccagtgggcagagaccctcagactggatgtggaggccctgcagtggtctggcgacccccacgaggtgccctcgtctctgtgcagcctgccctgcgggccgggggagcggaagaagatggtgaagggcgtcccctgctgttggcactgcgaggcctgtgacgggtaccgcttccaggtggacgagttcacatgcgaggcctgtcctggggacatgaggcccacgcccaaccacacgggctgccgccccacacctgtggtgcgcctgagctggtcctccccctgggcagccccgccgctcctcctggccgtgctgggcatcgtggccactaccacggtggtggccaccttcgtgcggtacaacaacacgcccatcgtccgggcctcgggccgagagctcagctacgtcctcctcaccggcatcttcctcatctacgccatcaccttcctcatggtggctgagcctggggccgcggtctgtgccgcccgcaggctcttcctgggcctgggcacgaccctcagctactctgccctgctcaccaagaccaaccgtatctaccgcatctttgagcagggcaagcgctcggtcacaccccctcccttcatcagccccacctcacagctggtcatcaccttcagcctcacctccctgcaggtggtggggatgatagcatggctgggggcccggcccccacacagcgtgattgactatgaggaacagcggacagtggaccccgagcaggccagaggggtgctcaagtgcgacatgtcggatctgtctctcatcggctgcctgggctacagcctcctgctcatggtcacgtgcacagtgtacgccatcaaggcccgtggcgtgcccgagaccttcaacgaggccaagcccatcggcttcaccatgtacaccacctgcatcatctggctggcattcgtgcccatcttctttggcactgcccagtcagctgaaaagatctacatccagacaaccacgctaaccgtgtccttgagcctgagtgcctcggtgtccctcggcatgctctacgtacccaaaacctacgtcatcctcttccatccagagcagaatgtgcagaagcgaaagcggagcctcaaggccacctccacggtggcagccccacccaagggcgaggatgcagaggcccacaagtagcagggcaggtgggaacgggactgcttgctgcctctcctttcttcctcttgcctcgaggtggaagctgtatagagcccgggtccacggtgaacagtcagtggcagggagtttgccaagaccatgctccgcgtcggtggggctggccttgagaaggaactggacccagctctaccccgattccagcatgtgagcttcatgcttcctcaccacagaccagactcgcttcccatggtgggaaacagccaccgagaaggttctagctctagaaagggactaaacttattctctcatccgaagtccaaagaggatgatgaagccctgggctttgcctggtttgcgggagatttcctcccctcagtcaacccccataacctggggattgggcagtgtggaagaacgtgtagaccccagaatgaaacatggggttggagtggaggaggagctgtctcagcaagaggagacctggggctgtgcatctggatggaggcactcaggcctgggtaggattcctctggcacggagggagagaccctgggtgagacccctgtgagcatgggaagggcctgcagtgggcgcgggagtgagctgaggaactggggtgcgcccccatgagattcccaatgccatgggctttcccccatccccccgggattgggcaaggtcagacttagagtacagctgttttcctcccctctgtgtactcccttaaatcaccccaaccttggccaggcatggtggctcacacctgtaatcccagcactttgggaggccgaggcaggtggatcacctgaggtccggagttcgagaccagcctggccaatgtggtgaaaccctgtctctactaaaaatacaaaaattagccaggtgtgatggtgggtgcctgtaatcccagttacttgggaggctgaggcaggagaatcgcttgaacctgggaggtggaggttgcagtgagctgtgattgtgccactgtactccagcctgggtgacagagcgagactctgtctcaaaaaaacaaaacaaaaaaacaccaaaaaaacccccaaacctgaagaaattcagatacacgtgtgtaatgttagtgatgtgagaacaaggagcaggggtgcatttgtgttgtgttcgggttggggatgggtttaggagctccaggttgggagcagtgacagagagtcatggccgtggtgagggtgaatcccaagtggatggctcaggacgggtatggaaacccttcattcctcataggtactgggaagtccatttgcaagctgagcgccaggcctggggaggaagaggcttgggctgcagatgcacgcacatttgtttttcactgatagtttttacaaaaagcttggtttaagttatggaattttatgtccctgggagtagaatttacatttgttaaattgaccactgtttaagatcagtatacattctctagtctgtgatgtctggagctagttttgagggtgaaccacactttatccaacatacaaactttcccatgcagcttctctggtgcgcagttggttttgaccgtgggactaggtgcttctgcaggttttaagtaattaacttaaaagcttctcctctgagaaacatttctgttgcgctactgactctccttctccacatttgttgtgttcctagggcttctctatagtgcacattaggacgtttcatttgttgctgaatgctttccagaattatttattccatagggtttctctcctgtgcagctctctcatgggtaatggggcgtgttttcttgccaaaggcggttccaccctcgtgattgtatagggctcttctcctgtatgaactctgagatcagtgagctctgatctccaagggaaagttttcctgcatttgctgttttctcatgtctctcccagtgtgaattctctggcttctagctgaaaacttttccacagttttacattcatgtggttttctccactgtgaactctgtgattcagaatcagaagcagttcttagtagaggcatttctacactgattgcactgaggatatctccccagtgtgaagtttctggcatagagtcctggcttcccgcagacgactttcacactctgccatgttcatgcctgtgggcctctctggcaggaactctgatgcaccgcgaggcccatgtactcctgtggctttctcacattcggtctacttgcagggtatctccacagcatgcaccattctgggtacagggggacatcctctgttactgaagatgttgtcatatttagtaccttcacaaggtttctctccttccagaattttctgatgtacacaaataactgacttccacaagagggcttttccacactcggtgtgtgcatacagtttctgcctgtgatcatttctttatgttattattttattttttcgagatagggtcttgctcaatttcttaggctggagtgcagtggcacgatcatagctcactgaagtttcgacctgggctcaagcaatcctcccgcttcagcctcctgagtagctggtgcgcacgaccatacccagctaatgttttattttttgtagagacgaggtctcactatgttgcccaggctggtctcgaacttctgagctcgagcgatcctcctgcctccacctcccaaagtgttcggattacaaacgtgagccatcgcacctagcctctttgatcatttctgtggtgttcagtgggggttgacagctccctaaagattttcctgtttttttgcatgcatgggtttgaattctttgaggtccaatttatttggacccctgaataaagttttgtgggttttcttctatgtgtggaattatataggcattcttccagtgtggtttctcttatgtcgagtgagagctgacctgcaccgaagtttgtcccatttgttgcccttgaattatctgtatgaattatatgttccagtgaaaatggagttctgggttggaggcttattccatgtttacacaattaaaattgcagtgttcctctctgggatgagagctctaaagcagagtaagattacgttctgatgtaagctttaaccacctatttataaggtctcacctgtggtccactgtgttgagacttctacagaagagcttctgtatagtaaccattttcttaggctgtctcacttgtgtgaatcttctgacacatttattatagctttgtcccatttcttatcctttttgctctttagaaatttccctttaatttattacattcattgcttactgtaaagagtccaggtaactgactttaattcaagttacttcctgttcaataaatttaacttttccc

SEQ ID NO: 186 - protein, 877 aa, Homo sapiens
MARPRRAREPLLVALLPLAWLAQAGLARAAGSVRLAGGLTLGGLFPVHARGAAGRACGPLKKEQGVHRLEAMLYALDRVNADPELLPGVRLGARLLDTCSRDTYALEQALSFVQALIRGRGDGDEVGVRCPGGVPPLRPAPPERVVAVVGASASSVSIMVANVLRLFAIPQISYASTAPELSDSTRYDFFSRVVPPDSYQAQAMVDIVRALGWNYVSTLASEGNYGESGVEAFVQISREAGGVCIAQSIKIPREPKPGEFSKVIRRLMETPNARGIIIFANEDDIRRVLEAARQANLTGHFLWVGSDSWGAKTSPILSLEDVAVGAITILPKRASIDGFDQYFMTRSLENNRRNIWFAEFWEENFNCKLTSSGTQSDDSTRKCTGEERIGRDSTYEQEGKVQFVIDAVYAIAHALHSMHQALCPGHTGLCPAMEPTDGRMLLQYIRAVRFNGSAGTPVMFNENGDAPGRYDIFQYQATNGSASSGGYQAVGQWAETLRLDVEALQWSGDPHEVPSSLCSLPCGPGERKKMVKGVPCCWHCEACDGYRFQVDEFTCEACPGDMRPTPNHTGCRPTPVVRLSWSSPWAAPPLLLAVLGIVATTTVVATFVRYNNTPIVRASGRELSYVLLTGIFLIYAITFLMVAEPGAAVCAARRLFLGLGTTLSYSALLTKTNRIYRIFEQGKRSVTPPPFISPTSQLVITFSLTSLQVVGMIAWLGARPPHSVIDYEEQRTVDPEQARGVLKCDMSDLSLIGCLGYSLLLMVTCTVYAIKARGVPETFNEAKPIGFTMYTTCIIWLAFVPIFFGTAQSAEKIYIQTTTLTVSLSLSASVSLGMLYVPKTYVILFHPEQNVQKRKRSLKATSTVAAPPKGEDAEAHK

SEQ ID NO: 187 - DNA, 6218 bp, Homo sapiens
agcttcgtcgagaacggaggacaccggcggtccagggtcctgggcagtcgcgccagagctgagcggagggcgcggcgcgagaacgaatctttgtgacattctctctcagcattctttatcccctgtttgctgaagacttcgaccaaagctggtcttagctgttggcattctcctgagaaaaggatagcttcagaaatcagaaaaacatttgggaggtgtctagcccagtggaccttctgaagagcaatgctaagaagacgtttggtttaaagaattaaaaggaagaacaacttaagagcttcttcaaagtttcccgcatgaaaattacttaaacttgcacacaacgtttcacaaaatcttttgtgaaagaagaaaaggaaattcagtgtgtgagtctcagcaggagttaagctaatgcagcttaaaataatgccgaaaaagaagcgcttatctgcgggcagagtgcccctgattctcttcctgtgccagatgattagtgcactggaagtacctcttgatccaaaacttcttgaagacttggtacagcctccaaccatcacccaacagtctccaaaagattacattattgaccctcgggagaatattgtaatccagtgtgaagccaaagggaaaccgcccccaagcttttcctggacccgtaatgggactcattttgacatcgataaagaccctctggtcaccatgaagcctggcacaggaacgctcataattaacatcatgagcgaagggaaagctgagacctatgaaggagtctatcagtgtacagcaaggaacgaacgcggagctgcagtttctaataacattgttgtccgcccatccagatcaccattgtggaccaaagaaaaacttgaaccaatcacacttcaaagtggtcagtctttagtacttccctgcagacccccaattggattaccaccacctataatattttggatggataattcctttcaaagacttccacaaagtgagagagtttctcaaggtttgaatggggacctttatttttccaatgtcctcccagaggacacccgcgaagactatatctgttatgctagatttaatcatactcaaaccatacagcagaagcaacctatttctgtgaaggtgatttcagctaaatcaagtagagagaggccaccaacatttttaactccagaaggcaatgcaagtaacaaagaggaattaagaggaaatgtgctttcactggagtgcattgcagaaggactgcctaccccaattatttactgggcaaaggaagatggaatgctacccaaaaacaggacagtttataagaactttgagaaaaccttgcagatcattcatgtttcagaagcagactctggaaattaccaatgtatagcaaaaaatgcattaggagccatccaccataccatttctgttagagttaaagcggctccatactggatcacagcccctcaaaatcttgtgctgtccccaggagaggatgggaccttgatctgcagagctaatggcaaccccaaacccagaattagctggttaacaaatggagtcccaatagaaattgcccctgatgaccccagcagaaaaatagatggcgataccattattttttcaaatgttcaagaaagatcaagtgcagtctatcagtgcaatgcctctaatgaatatggatatttactggcaaacgcatttgtaaatgtgctggctgagccaccacgaatcctcacacctgcaaacacactctaccaggtcattgcaaacaggcctgctttactagactgtgccttctttgggtctcctctcccaaccatcgagtggtttaaaggagctaaaggaagtgctcttcatgaagatatttatgttttacatgaaaatggaactttggaaattcctgtggcccaaaaggacagtacaggaacttatacgtgtgttgcaaggaataaattagggatggcaaagaatgaagttcacttagaaatcaaagatgctacatggatcgttaaacagcccgaatatgcagttgtgcaaagagggagcatggtgtcctttgaatgcaaagtgaaacatgatcacaccttatccctcactgtcctgtggctgaaggacaacagggaactgcccagtgatgaaaggttcactgttgacaaggatcatctagtggtagctgatgtcagtgacgatgacagcgggacctacacgtgtgtggccaacaccactctggacagcgtctccgccagcgctgtgcttagcgttgttgctcctactccaactccagctcccgtttacgatgtcccaaatcctccctttgacttagaactgacagatcaacttgacaaaagtgttcagctgtcatggaccccaggcgatgacaacaatagccccattacaaaattcatcatcgaatatgaagatgcaatgcacaagccagggctgtggcaccaccaaactgaagtttctggaacacagaccacagcccagctgaacctgtctccttacgtgaactactccttccgcgtgatggcagtgaacagcattgggaagagcttgcccagcgaggcgtctgagcagtatttgacgaaagcctcagaaccagataaaaaccccacagctgtggaaggactgggatcagagcctgataatttggtgattacgtggaagcccttgaatggtttcgaatctaatgggccaggccttcagtacaaagttagctggcgccagaaagatggtgatgatgaatggacatctgtggttgtggcaaatgtatccaaatatattgtctcaggcacgccaacctttgttccatacctgatcaaagttcaggccctgaatgacatggggtttgcccccgagccagctgtagtcatgggacattctggagaagacctcccaatggtggctcctgggaacgtgcgtgtgaatgtggtgaacagtaccttagccgaggtgcactgggacccagtacctctgaaaagcatccgaggacacctacaaggctatcggatttactattggaagacccagagttcatctaaaagaaacagacgtcacattgagaaaaagatcctcaccttccaaggcagcaagactcatggcatgttgccggggctagagccctttagccactacacactgaatgtccgagtggtcaatgggaaaggggagggcccagccagccctgacagagtctttaatactccagaaggagtccccagtgctccctcgtctttgaagattgtgaatccaacactggactctctcactttggaatgggatccaccgagccacccgaatggcattttgacagagtacaccttaaagtatcagccaattaacagcacacatgaattaggccctctggtagatttgaaaattcctgccaacaagacacggtggactttaaaaaatttaaatttcagcactcgatataagttttatttctatgcacaaacatcagcaggatcaggaagtcaaattacagaggaagcagtaacaactgtggatgaagcgatggcaagccggcaggtggatattgcaactcagggctggttcattggtctgatgtgtgctgttgctctccttatcttaattttgctgattgtttgcttcatcagaagaaacaagggtggtaaatatccagttaaagaaaaggaagatgcccatgctgaccctgaaatccagcctatgaaggaagatgatgggacatttggagaatacagtgatgcagaagaccacaagcctttgaaaaaaggaagtcgaactccttcagacaggactgtgaaaaaagaagatagtgacgacagcctagttgactatggagaaggggttaatggccagttcaatgaggatggctcctttattggacaatacagtggtaagaaagagaaagagccggctgaaggaaacgaaagctcagaggcaccttctcctgtcaacgccatgaattcctttgtttaatttttaagctctttgccaatattccatttctctagaatgtttatcctaagcacttgtttgtcagccctctcatactatgaacatatgggtagagagtatattttctgctgtatgttagtattatgagaatagttacagcaaaaacataactcagtcaaatgatatgttaatatgaactggaatgcaaagtgcatactttttcattcaaaatgggtattcttgatttcctcagaactgataaaaaataatgcaacatcaccaacagatcctgttatttcctctgcaggatacagttcaatatgatgcatgaaaaatgctccacatttaaaggacatacccgtgtatgttatgaaaacatggtttgatactttgtttatactaccctcagctgaacccctatatatgaattccgttttcattgtcaagagtgttactgtagtattctctagaacttcaatgtctttgtggacattgttgtgaaattggtgactatgtatagctgtcgttagtctttttgggagactgttaggaacagtttgtacagtatatacttgctaaatgagttcattatgacagtcacattgctgatgcttactgagaactattacctactcttggctcctgttactccgtaggcttcttaatcttccaggcattacagcagcacagtgttctactttttacatcatttctatgttcggttgtttttaggcataaacaatgtgtattgcagtgcatttcggcatttgtgccatactgaaagaatcaaaaacaaatcatccaaattaaatttcaaacattatttcagagaacacagggcaagacacatacagtgccttcagatattaagcattccacaacatcgtgcattctgtatcagctggtccagtccattctgggtcctagattactgtcattgtctaaaagtaacttttaaaaagcagagttcatgaaaactgcaatgctgggaaaagaaggaaacatgaaaataaaaataagacagtttattagaaatagcatttcctcataagcataaaaagaaaatctttgttgccaactgaagcacatgatgattttgtggtcctttatggtttctattacatgcagtaagaaagatgtcaacatgctagaaaattaattttaaaactaagttattccaacactaaaagcatacaacagcatgccaacagtaatatattattctccaagactttacctatgtaagtgttcaaaactctgcagcattaaacaacgtgtatgcaaattgttatggatacatttcagaatctaagaaatcaggcaagtgcttaaaaggccaacggtccaagggattacatctgcagtttaaaaagtaaatatatattctatcgtattcataaacaatatctatcaaatgggttacctccaaatatgaaaatctataacaacctatggttgaaggaatgctcagtttcatttgccaataaattggtttctcataacttgcatcaagtttaattttaagtaaagctttttatatgtagatattttgttgaatttgtaaatacacttaaaatgtagatgctatatgcttataggtgttacatacaaataaacatgcaatgtttatgttgtactgtataagaggtaagctaattaatgcagtgaatgggattggaaagcatctacttaaatatctattgggttcccccctccccccaccttttttgctgtgaaactgaaatagtgaacttttctacgtattgacagcagatttttcgatgaaatcttcagagctttgcctatggggcacagtaggcctagtaacctggcatgtttgatatatgtaggtaaagcataatttaaagtaatcccaggtaaagatggccctaaatactttcatgtctctatattcatttttcacagatccacctgtctcttgaaaatataaaaagacaaaacaggtttgccttggcatcagagagcacaaagattaaaagttactttaaatttgccaatattttgggagaacaataaaactacattttttcctcttccatactggtagatgcgaaatttatctgtgcatgaaagggtcacttctgtaatagtgcaacagatttggtattaaaaattaaatgtggttttaaaagttcctctctcttttgtaatttatgttcccaattgagtgtgaatgtccaagtaatggtgtatgtaatggtacaggcaaatgtgactggatttccctcaaaaaagtaactattaaacagtcttgatctctt

SEQ ID NO: 188 - protein, 1180 aa, Homo sapiens
MQLKIMPKKKRLSAGRVPLILFLCQMISALEVPLDPKLLEDLVQPPTITQQSPKDYIIDPRENIVIQCEAKGKPPPSFSWTRNGTHFDIDKDPLVTMKPGTGTLIINIMSEGKAETYEGVYQCTARNERGAAVSNNIVVRPSRSPLWTKEKLEPITLQSGQSLVLPCRPPIGLPPPIIFWMDNSFQRLPQSERVSQGLNGDLYFSNVLPEDTREDYICYARFNHTQTIQQKQPISVKVISAKSSRERPPTFLTPEGNASNKEELRGNVLSLECIAEGLPTPIIYWAKEDGMLPKNRTVYKNFEKTLQIIHVSEADSGNYQCIAKNALGAIHHTISVRVKAAPYWITAPQNLVLSPGEDGTLICRANGNPKPRISWLTNGVPIEIAPDDPSRKIDGDTIIFSNVQERSSAVYQCNASNEYGYLLANAFVNVLAEPPRILTPANTLYQVIANRPALLDCAFFGSPLPTIEWFKGAKGSALHEDIYVLHENGTLEIPVAQKDSTGTYTCVARNKLGMAKNEVHLEIKDATWIVKQPEYAVVQRGSMVSFECKVKHDHTLSLTVLWLKDNRELPSDERFTVDKDHLVVADVSDDDSGTYTCVANTTLDSVSASAVLSVVAPTPTPAPVYDVPNPPFDLELTDQLDKSVQLSWTPGDDNNSPITKFIIEYEDAMHKPGLWHHQTEVSGTQTTAQLNLSPYVNYSFRVMAVNSIGKSLPSEASEQYLTKASEPDKNPTAVEGLGSEPDNLVITWKPLNGFESNGPGLQYKVSWRQKDGDDEWTSVVVANVSKYIVSGTPTFVPYLIKVQALNDMGFAPEPAVVMGHSGEDLPMVAPGNVRVNVVNSTLAEVHWDPVPLKSIRGHLQGYRIYYWKTQSSSKRNRRHIEKKILTFQGSKTHGMLPGLEPFSHYTLNVRVVNGKGEGPASPDRVFNTPEGVPSAPSSLKIVNPTLDSLTLEWDPPSHPNGILTEYTLKYQPINSTHELGPLVDLKIPANKTRWTLKNLNFSTRYKFYFYAQTSAGSGSQITEEAVTTVDEAMASRQVDIATQGWFIGLMCAVALLILILLIVCFIRRNKGGKYPVKEKEDAHADPEIQPMKEDDGTFGEYSDAEDHKPLKKGSRTPSDRTVKKEDSDDSLVDYGEGVNGQFNEDGSFIGQYSGKKEKEPAEGNESSEAPSPVNAMNSFV

SEQ ID NO: 189 - DNA, 3917 bp, Homo sapiens
tagtcggagcgaggtggcgagtcgctgagcccgccgcggccccgagagcggctgcagccgccgccgccgggaaggagagggcgaggcgcgcccgagccgccgccgccgccgccaccgccgccgccgccaccaccgccaccggagtcgcgggccagccgggcagcctccgcgggccccggccggggcggggggcgcgggccacaggcccctgctccggccgtcgtttgcagaccgcgggcgccgatgtcgcccgcgccccgttaggatgagtctcgggtcgggcgaggagccgccgcagccgccgccgcccgagccgcgggcaggagcctcgggagccgccgccgccgccgccgccgcccggccgggccccgacgccgcccgcgcgcccccgggcccccgacacacatgagattcttcaggctcactttcaagtgcttcgtggactgcttctgactgcgccgcccgcgccccgcaccccgccgtccgcccgccgccccgtcccccggcccggccgccccccggcccccggccggcccgcgccctcggggccctccccggtgccgccggtgccccccgcctgaccgccgccccccgtgaggcgccgcgaccccggcccggccgtgcggcccgccggggccatggcgaagaagagcgccgagaacggcatctatagcgtgtccggcgacgagaagaagggccccctcatcgcgcccgggcccgacggggccccggccaagggcgacggccccgtgggcctggggacacccggcggccgcctggccgtgccgccgcgcgagacctggacgcgccagatggacttcatcatgtcgtgcgtgggcttcgccgtgggcttgggcaacgtgtggcgcttcccctacctgtgctacaagaacggcggaggtgtgttccttattccctacgtcctgatcgccctggttggaggaatccccattttcttcttagagatctcgctgggccagttcatgaaggccggcagcatcaatgtctggaacatctgtcccctgttcaaaggcctgggctacgcctccatggtgatcgtcttctactgcaacacctactacatcatggtgctggcctggggcttctattacctggtcaagtcctttaccaccacgctgccctgggccacatgtggccacacctggaacactcccgactgcgtggagatcttccgccatgaagactgtgccaatgccagcctggccaacctcacctgtgaccagcttgctgaccgccggtcccctgtcatcgagttctgggagaacaaagtcttgaggctgtctgggggactggaggtgccaggggccctcaactgggaggtgaccctttgtctgctggcctgctgggtgctggtctacttctgtgtctggaagggggtcaaatccacgggaaagatcgtgtacttcactgctacattcccctacgtggtcctggtcgtgctgctggtgcgtggagtgctgctgcctggcgccctggatggcatcatttactatctcaagcctgactggtcaaagctggggtcccctcaggtgtggatagatgcggggacccagattttcttttcttacgccattggcctgggggccctcacagccctgggcagctacaaccgcttcaacaacaactgctacaaggacgccatcatcctggctctcatcaacagtgggaccagcttctttgctggcttcgtggtcttctccatcctgggcttcatggctgcagagcagggcgtgcacatctccaaggtggcagagtcagggccgggcctggccttcatcgcctacccgcgggctgtcacgctgatgccagtggccccactctgggctgccctgttcttcttcatgctgttgctgcttggtctcgacagccagtttgtaggtgtggagggcttcatcaccggcctcctcgacctcctcccggcctcctactacttccgtttccaaagggagatctctgtggccctctgttgtgccctctgctttgtcatcgatctctccatggtgactgatggcgggatgtacgtcttccagctgtttgactactactcggccagcggcaccaccctgctctggcaggccttttgggagtgcgtggtggtggcctgggtgtacggagctgaccgcttcatggacgacattgcctgtatgatcgggtaccgaccttgcccctggatgaaatggtgctggtccttcttcaccccgctggtctgcatgggcatcttcatcttcaacgttgtgtactacgagccgctggtctacaacaacacctacgtgtacccgtggtggggtgaggccatgggctgggccttcgccctgtcctccatgctgtgcgtgccgctgcacctcctgggctgcctcctcagggccaagggcaccatggctgagcgctggcagcacctgacccagcccatctggggcctccaccacttggagtaccgagctcaggacgcagatgtcaggggcctgaccaccctgaccccagtgtccgagagcagcaaggtcgtcgtggtggagagtgtcatgtgacaactcagctcacatcaccagctcacctctggtagccatagcagcccctgcttcagccccaccgcacccctccagggggcctgcctttccctgacacttttggggtctgcctgggggaggaggggagaaagcaccatgagtgctcactaaaacaactttttccatttttaataaaacgccaaaaatatcacaacccaccaaaaatagatgcctctccccctccagccctagccgagctggtcctaggccccgcctagtgccccacccccacccacagtgctgcactcctcctgcccctgccacgcccaccccctgcccacctctccaggctctgctctgcagcacacccgtgggtgacccctcaccccagaagcagcagtggcagcttgggaaatgtgaggaagggaaggagggagagacgggagggaggagagagaggagaagggaggcaggggaggggcagcagaaccaaggcaaatatttcagctgggctatacccctctccccatccctgttatagaagcttagagagccagccagcaatggaaccttctggttcctgcgccaatcgccaccagtatcaattgtgtgagcttgggtgcgagtgcacgcgtgcgtgagtacggagagtatatatagatctctatctcttagcaaaggtgaatgccagatgtaaatggcgcctctgggcaaaggaggcttgtattttgcacattttataaaaacttgagagaatgagatttctgcttgtatatttctaaaaagaggaaggagcccaaaccatcctctccttaccactcccatccctgtgagccctaccttacccctctgcccctagccaaggagtgtgaatttatagatctaactttcataggcaaaacaaaagcttcgagctgttgcgtgtgtgagtctgttgtgtggatgtgcgtgtgtggtccccagccccagactggattggaaaagtgcatggtgggggcctcggggctgtccccacgctgtccctttgccacaagtctgtggggcaagaggctgcaatattccgtcctgggtgtctgggctgctaacctggcctgctcaggcttcccaccctgtgcggggcacacccccaggaagggaccctggacacggctcccacgtccaggcttaaggtggatgcacttcccgcacctccagtcttctgtgtagcagctttaacccacgtttgtctgtcacgtccagtcccgagacggctgagtgaccccaagaaaggcttccccgacacccagacagaggctgcagggctggggctgggtgagggtggcgggcctgcggggacattctactgtgctaaaaagccactgcagacatagcaataaaaacatgtcattttcc

SEQ ID NO: 190 - protein, 635 aa, Homo sapiens
MAKKSAENGIYSVSGDEKKGPLIAPGPDGAPAKGDGPVGLGTPGGRLAVPPRETWTRQMDFIMSCVGFAVGLGNVWRFPYLCYKNGGGVFLIPYVLIALVGGIPIFFLEISLGQFMKAGSINVWNICPLFKGLGYASMVIVFYCNTYYIMVLAWGFYYLVKSFTTTLPWATCGHTWNTPDCVEIFRHEDCANASLANLTCDQLADRRSPVIEFWENKVLRLSGGLEVPGALNWEVTLCLLACWVLVYFCVWKGVKSTGKIVYFTATFPYVVLVVLLVRGVLLPGALDGIIYYLKPDWSKLGSPQVWIDAGTQIFFSYAIGLGALTALGSYNRFNNNCYKDAIILALINSGTSFFAGFVVFSILGFMAAEQGVHISKVAESGPGLAFIAYPRAVTLMPVAPLWAALFFFMLLLLGLDSQFVGVEGFITGLLDLLPASYYFRFQREISVALCCALCFVIDLSMVTDGGMYVFQLFDYYSASGTTLLWQAFWECVVVAWVYGADRFMDDIACMIGYRPCPWMKWCWSFFTPLVCMGIFIFNVVYYEPLVYNNTYVYPWWGEAMGWAFALSSMLCVPLHLLGCLLRAKGTMAERWQHLTQPIWGLHHLEYRAQDADVRGLTTLTPVSESSKVVVVESVM

SEQ ID NO: 191 - DNA, 1330 bp, Homo sapiens
gcggacgcggggcgccagcaggtggcgctggacgcgcaacggacaaggaggcggggcctgcagctggcttggaggctccgcgctctggaggctcaggcgccgcgtggggcccgcacctctgggcagcagcggcagccgagactcacggtcaagctaaggcgaagagtgggtggctgaagccatactattttatagaattaatggaaagcagaaaagacatcacaaaccaagaagaactttggaaaatgaagcctaggagaaatttagaagaagacgattatttgcataaggacacgggagagaccagcatgctaaaaagacctgtgcttttgcatttgcaccaaacagcccatgctgatgaatttgactgcccttcagaacttcagcacacacaggaactctttccacagtggcacttgccaattaaaatagctgctattatagcatctctgacttttctttacactcttctgagggaagtaattcaccctttagcaacttcccatcaacaatatttttataaaattccaatcctggtcatcaacaaagtcttgccaatggtttccatcactctcttggcattggtttacctgccaggtgtgatagcagcaattgtccaacttcataatggaaccaagtataagaagtttccacattggttggataagtggatgttaacaagaaagcagtttgggcttctcagtttcttttttgctgtactgcatgcaatttatagtctgtcttacccaatgaggcgatcctacagatacaagttgctaaactgggcatatcaacaggtccaacaaaataaagaagatgcctggattgagcatgatgtttggagaatggagatttatgtgtctctgggaattgtgggattggcaatactggctctgttggctgtgacatctattccatctgtgagtgactctttgacatggagagaatttcactatattcagagcaagctaggaattgtttcccttctactgggcacaatacacgcattgatttttgcctggaataagtggatagatataaaacaatttgtatggtatacacctccaacttttatgatagctgttttccttccaattgttgtcctgatatttaaaagcatactattcctgccatgcttgaggaagaagatactgaagattagacatggttgggaagacgtcaccaaaattaacaaaactgagatatgttcccagttgtagaattactgtttacacacatttttgttcaatattgatatattttatcaccaacatttcaagtttgtatttgttaataaaatgattattcaaggaaaaaaaaaaaaaaaaaa

SEQ ID NO: 192 - protein, 339 aa, Homo sapiens
MESRKDITNQEELWKMKPRRNLEEDDYLHKDTGETSMLKRPVLLHLHQTAHADEFDCPSELQHTQELFPQWHLPIKIAAIIASLTFLYTLLREVIHPLATSHQQYFYKIPILVINKVLPMVSITLLALVYLPGVIAAIVQLHNGTKYKKFPHWLDKWMLTRKQFGLLSFFFAVLHAIYSLSYPMRRSYRYKLLNWAYQQVQQNKEDAWIEHDVWRMEIYVSLGIVGLAILALLAVTSIPSVSDSLTWREFHYIQSKLGIVSLLLGTIHALIFAWNKWIDIKQFVWYTPPTFMIAVFLPIVVLIFKSILFLPCLRKKILKIRHGWEDVTKINKTEICSQL

SEQ ID NO: 193 - DNA, 1381 bp, Homo sapiens
cttctcttttccctagactgcagccagcggagcccgcagccggcccgagccaggaacccaggtccggagcctcaacttcaggatgttgacaacattgctgccgatactgctgctgtctggctgggccttttgtagccaagacgcctcagatggcctccaaagacttcatatgctccagatctcctacttccgcgacccctatcacgtgtggtaccagggcaacgcgtcgctggggggacacctaacgcacgtgctggaaggcccagacaccaacaccacgatcattcagctgcagcccttgcaggagcccgagagctgggcgcgcacgcagagtggcctgcagtcctacctgctccagttccacggcctcgtgcgcctggtgcaccaggagcggaccttggcctttcctctgaccatccgctgcttcctgggctgtgagctgcctcccgagggctctagagcccatgtcttcttcgaagtggctgtgaatgggagctcctttgtgagtttccggccggagagagccttgtggcaggcagacacccaggtcacctccggagtggtcaccttcaccctgcagcagctcaatgcctacaaccgcactcggtatgaactgcgggaattcctggaggacacctgtgtgcagtatgtgcagaaacatatttccgcggaaaacacgaaagggagccaaacaagccgctcctacacttcgctggtcctgggcgtcctggtgggcggtttcatcattgctggtgtggctgtaggcatcttcctgtgcacaggtggacggcgatgttaattactctccagccccgtcagaaggggctggattgatggaggctggcaagggaaagtttcagctcactgtgaagccagactccccaactgaaacaccagaaggtttggagtgacagctcctttcttctcccacatctgcccactgaagatttgagggaggggagatggagaggagaggtggacaaagtacttggtttgctaagaacctaagaacgtgtatgctttgctgaattagtctgataagtgaatgtttatctatctttgtggaaaacagataatggagttggggcaggaagcctatggcccatcctccaaagacagacagaatcacctgaggcgttcaaaagatataaccaaataaacaagtcatccacaatcaaaatacaacattcaatacttccaggtgtgtcagacttgggatgggacgctgatataatagggtagaaagaagtaacacgaagaagtggtggaaatgtaaaatccaagtcatatggcagtgatcaattattaatcaattaataatattaataaatttcttatatttaaggcaaaaaaaaaataaaaaaaaaaaaaaaaaaaaaaa

SEQ ID NO: 194 - protein, 238 aa, Homo sapiens
MLTTLLPILLLSGWAFCSQDASDGLQRLHMLQISYFRDPYHVWYQGNASLGGHLTHVLEGPDTNTTIIQLQPLQEPESWARTQSGLQSYLLQFHGLVRLVHQERTLAFPLTIRCFLGCELPPEGSRAHVFFEVAVNGSSFVSFRPERALWQADTQVTSGVVTFTLQQLNAYNRTRYELREFLEDTCVQYVQKHISAENTKGSQTSRSYTSLVLGVLVGGFIIAGVAVGIFLCTGGRRC

SEQ ID NO: 195 - DNA, 2984 bp, Homo sapiens
gaggaggaacagaaaagaaaagaaaagaaaaagtgggaaacaaataatctaagaatgaggagaaagcaagaagagtgacccccttgtgggcactccattggttttatggcgcctctactttctggagtttgtgtaaaacaaaaatattatggtctttgtgcacatttacatcaagctcagcctgggcggcacagccagatgcgagatgcgtctctgctgatctgagtctgcctgcagcatggacctgggtcttccctgaagcatctccagggctggagggacgactgccatgcaccgagggctcatccatccacagagcagggcagtgggaggagacgccatgacccccatcctcacggtcctgatctgtctcgggctgagtctgggcccccggacccacgtgcaggcagggcacctccccaagcccaccctctgggctgaaccaggctctgtgatcacccaggggagtcctgtgaccctcaggtgtcaggggggccaggagacccaggagtaccgtctatatagagaaaagaaaacagcaccctggattacacggatcccacaggagcttgtgaagaagggccagttccccatcccatccatcacctgggaacatgcagggcggtatcgctgttactatggtagcgacactgcaggccgctcagagagcagtgaccccctggagctggtggtgacaggagcctacatcaaacccaccctctcagcccagcccagccccgtggtgaactcaggagggaatgtaaccctccagtgtgactcacaggtggcatttgatggcttcattctgtgtaaggaaggagaagatgaacacccacaatgcctgaactcccagccccatgcccgtgggtcgtcccgcgccatcttctccgtgggccccgtgagcccgagtcgcaggtggtggtacaggtgctatgcttatgactcgaactctccctatgagtggtctctacccagtgatctcctggagctcctggtcctaggtgtttctaagaagccatcactctcagtgcagccaggtcctatcgtggcccctgaggagaccctgactctgcagtgtggctctgatgctggctacaacagatttgttctgtataaggacggggaacgtgacttccttcagctcgctggcgcacagccccaggctgggctctcccaggccaacttcaccctgggccctgtgagccgctcctacgggggccagtacagatgctacggtgcacacaacctctcctccgagtggtcggcccccagcgaccccctggacatcctgatcgcaggacagttctatgacagagtctccctctcggtgcagccgggccccacggtggcctcaggagagaacgtgaccctgctgtgtcagtcacagggatggatgcaaactttccttctgaccaaggagggggcagctgatgacccatggcgtctaagatcaacgtaccaatctcaaaaataccaggctgaattccccatgggtcctgtgacctcagcccatgcggggacctacaggtgctacggctcacagagctccaaaccctacctgctgactcaccccagtgaccccctggagctcgtggtctcaggaccgtctgggggccccagctccccgacaacaggccccacctccacatctggccctgaggaccagcccctcacccccaccgggtcggatccccagagtggtctgggaaggcacctgggggttgtgatcggcatcttggtggccgtcatcctactgctcctcctcctcctcctcctcttcctcatcctccgacatcgacgtcagggcaaacactggacatcgacccagagaaaggctgatttccaacatcctgcaggggctgtggggccagagcccacagacagaggcctgcagtggaggtccagcccagctgccgatgcccaggaagaaaacctctatgctgccgtgaagcacacacagcctgaggatggggtggagatggacactcggagcccacacgatgaagacccccaggcagtgacgtatgccgaggtgaaacactccagacctaggagagaaatggcctctcctccttccccactgtctggggaattcctggacacaaaggacagacaggcggaagaggacaggcagatggacactgaggctgctgcatctgaagccccccaggatgtgacctacgcccagctgcacagcttgacccttagacggaaggcaactgagcctcctccatcccaggaagggccctctccagctgtgcccagcatctacgccactctggccatccactagcccagggggggacgcagaccccacactccatggagtctggaatgcatgggagctgcccccccagtggacaccattggaccccacccagcctggatctaccccaggagactctgggaacttttaggggtcactcaattctgcagtataaataactaatgtctctacaattttgaaataaagcaacagacttctcaataatcaatgaagtagctgagaaaactaagtcagaaagtgcattaaactgaatcacaatgtaaatattacacatcaagcgatgaaactggaaaactacaagccacgaatgaatgaattaggaaagaaaaaaagtaggaaatgaatgatcttggctttcctataagaaatttagggcagggcacggtggctcacgcctgtaattccagcactttgggaggccgaggcgggcagatcacgagttcaggagatcgagaccatcttggccaacatggtgaaaccctgtctctcctaaaaatacaaaaattagctggatgtggtggcagtgcctgtaatcccagctatttgggaggctgaggcaggagaatcgcttgaaccagggagtcagaggtttcagtgagccaagatcgcaccactgctctccagcctggcgacagagggagactccatctcaaattaaaaaaaaaaaaaaaaaagaaagaaaaaaaaaaaaaaaaaa

SEQ ID NO: 196 - protein, 650 aa, Homo sapiens
MTPILTVLICLGLSLGPRTHVQAGHLPKPTLWAEPGSVITQGSPVTLRCQGGQETQEYRLYREKKTAPWITRIPQELVKKGQFPIPSITWEHAGRYRCYYGSDTAGRSESSDPLELVVTGAYIKPTLSAQPSPVVNSGGNVTLQCDSQVAFDGFILCKEGEDEHPQCLNSQPHARGSSRAIFSVGPVSPSRRWWYRCYAYDSNSPYEWSLPSDLLELLVLGVSKKPSLSVQPGPIVAPEETLTLQCGSDAGYNRFVLYKDGERDFLQLAGAQPQAGLSQANFTLGPVSRSYGGQYRCYGAHNLSSEWSAPSDPLDILIAGQFYDRVSLSVQPGPTVASGENVTLLCQSQGWMQTFLLTKEGAADDPWRLRSTYQSQKYQAEFPMGPVTSAHAGTYRCYGSQSSKPYLLTHPSDPLELVVSGPSGGPSSPTTGPTSTSGPEDQPLTPTGSDPQSGLGRHLGVVIGILVAVILLLLLLLLLFLILRHRRQGKHWTSTQRKADFQHPAGAVGPEPTDRGLQWRSSPAADAQEENLYAAVKHTQPEDGVEMDTRSPHDEDPQAVTYAEVKHSRPRREMASPPSPLSGEFLDTKDRQAEEDRQMDTEAAASEAPQDVTYAQLHSLTLRRKATEPPPSQEGPSPAVPSIYATLAIH

SEQ ID NO: 197 - DNA, 1502 bp, Homo sapiens
cctgcgtccccgccccgcgcagccgccgcgctcctgcgctccgaggtccgaggttcccgagatgaaggtctggctgctgcttggtcttctgctggtgcacgaagcgctggaggatgttactggccaacaccttcccaagaacaagcgtccaaaagaaccaggagagaatagaatcaaacctaccaacaagaaggtgaagcccaaaattcctaaaatgaaggacagggactcagccaattcagcaccaaagacgcagtctatcatgatgcaagtgctggataaaggtcgcttccagaaacccgccgctaccctgagtctgctggcggggcaaactgtagagcttcgatgtaaagggagtagaattgggtggagctaccctgcgtatctggacacctttaaggattctcgcctcagcgtcaagcagaatgagcgctacggccagttgactctggtcaactccacctcggcagacacaggtgaattcagctgctgggtgcagctctgcagcggctacatctgcaggaaggacgaggccaaaacgggctccacctacatcttttttacagagaaaggagaactctttgtaccttctcccagctacttcgatgttgtctacttgaacccggacagacaggctgtggttccttgtcgggtgaccgtgctgtcggccaaagtcacgctccacagggaattcccagccaaggagatcccagccaatggaacggacattgtttatgacatgaagcggggctttgtgtatctgcaacctcattccgagcaccagggtgtggtttactgcagggcggaggccgggggcagatctcagatctccgtcaagtaccagctgctctacgtggcggttcccagtggccctccctcaacaaccatcttggcttcttcaaacaaagtgaaaagtggggacgacatcagtgtgctctgcactgtcctgggggagcccgatgtggaggtggagttcacctggatcttcccagggcagaaggatgaaaggcctgtgacgatccaagacacttggaggttgatccacagaggactgggacacaccacgagaatctcccagagtgtcattacagtggaagacttcgagacgattgatgcaggatattacatttgcactgctcagaatcttcaaggacagaccacagtagctaccactgttgagttttcctgacttggaaaaggaaatgtaatgaacttatggaaagcccatttgtgtacacagtcagctttggggttccttttattagtgctttgccagaggctgatgtcaagcaccacaccccaaccccagcgtctcgtgagtccgacccagacatccaaactaaaaggaagtcatccagtctattcacagaagtgttaacttttctaacagaaagcatgattttgattgcttacctacatacgtgttcctagtttttatacatgtgtaaacaattttatataatcaatcatttctattaaatgagcacgtttttgtaaaaaat

SEQ ID NO: 198 - protein, 375 aa, Homo sapiens
MKVWLLLGLLLVHEALEDVTGQHLPKNKRPKEPGENRIKPTNKKVKPKIPKMKDRDSANSAPKTQSIMMQVLDKGRFQKPAATLSLLAGQTVELRCKGSRIGWSYPAYLDTFKDSRLSVKQNERYGQLTLVNSTSADTGEFSCWVQLCSGYICRKDEAKTGSTYIFFTEKGELFVPSPSYFDVVYLNPDRQAVVPCRVTVLSAKVTLHREFPAKEIPANGTDIVYDMKRGFVYLQPHSEHQGVVYCRAEAGGRSQISVKYQLLYVAVPSGPPSTTILASSNKVKSGDDISVLCTVLGEPDVEVEFTWIFPGQKDERPVTIQDTWRLIHRGLGHTTRISQSVITVEDFETIDAGYYICTAQNLQGQTTVATTVEFS

SEQ ID NO: 199 - DNA, 1875 bp, Homo sapiens
agctgcggcggccgcaggttccaaagcgggtccgagccgccgccgcgcgcgcgccgcgcactgcagccccaggccccggccccccacccacgtctgcgttgctgccccgcctgggccaggccccaaaggcaaggacaaagcagctgtcagggaacctccgccggagtcgaatttacgtgcagctgccggcaaccacaggttccaagatggtttgcgggggcttcgcgtgttccaagaactgcctgtgcgccctcaacctgctttacaccttggttagtctgctgctaattggaattgctgcgtggggcattggcttcgggctgatttccagtctccgagtggtcggcgtggtcattgcagtgggcatcttcttgttcctgattgctttagtgggtctgattggagctgtaaaacatcatcaggtgttgctatttttttatatgattattctgttacttgtatttattgttcagttttctgtatcttgcgcttgtttagccctgaaccaggagcaacagggtcagcttctggaggttggttggaacaatacggcaagtgctcgaaatgacatccagagaaatctaaactgctgtgggttccgaagtgttaacccaaatgacacctgtctggctagctgtgttaaaagtgaccactcgtgctcgccatgtgctccaatcataggagaatatgctggagaggttttgagatttgttggtggcattggcctgttcttcagttttacagagatcctgggtgtttggctgacctacagatacaggaaccagaaagacccccgcgcgaatcctagtgcattcctttgatgagaaaacaaggaagatttcctttcgtattatgatcttgttcactttctgtaattttctgttaagctccatttgccagtttaaggaaggaaacactatctggaaaagtaccttattgatagtggaattatatatttttactctatgtttctctacatgtttttttctttccgttgctgaaaaatatttgaaacttgtggtctctgaagctcggtggcacctggaatttactgtattcattgtcgggcactgtccactgtggcctttcttagcatttttacctgcagaaaaactttgtatggtaccactgtgttggttatatggtgaatctgaacgtacatctcactggtataattatatgtagcactgtgctgtgtagatagttcctactggaaaaagagtggaaatttattaaaatcagaaagtatgagatcctgttatgttaagggaaatccaaattcccaattttttttggtctttttaggaaagatgtgttgtggtaaaaagtgttagtataaaaatgataatttacttgtagtcttttatgattacaccaatgtattctagaaatagttatgtcttaggaaattgtggtttaatttttgacttttacaggtaagtgcaaaggagaagtggtttcatgaaatgttctaatgtataataacatttaccttcagcctccatcagaatggaacgagttttgagtaatcaggaagtatatctatatgatcttgatattgttttataataatttgaagtctaaaagactgcatttttaaacaagttagtattaatgcgttggcccacgtagcaaaaagatatttgattatcttaaaaattgttaaataccgttttcatgaaagttctcagtattgtaacagcaacttgtcaaacctaagcatatttgaatatgatctcccataatttgaaattgaaatcgtattgtgtggctctgtatattctgttaaaaaattaaaggacagaaacctttctttgtgtatgcatgtttgaattaaaagaaagtaatggaagaattgatcgatgaaaaaaaaaa

SEQ ID NO: 200 - protein, 204 aa, Homo sapiens
MVCGGFACSKNCLCALNLLYTLVSLLLIGIAAWGIGFGLISSLRVVGVVIAVGIFLFLIALVGLIGAVKHHQVLLFFYMIILLLVFIVQFSVSCACLALNQEQQGQLLEVGWNNTASARNDIQRNLNCCGFRSVNPNDTCLASCVKSDHSCSPCAPIIGEYAGEVLRFVGGIGLFFSFTEILGVWLTYRYRNQKDPRANPSAFL

SEQ ID NO: 201 - DNA, 3632 bp, Homo sapiens
aaagagctggaggcgcgcaggccggctccgctccggccccggacgatgcggcgcgcccaggatgctgccgtgcctcgtagtgctgctggcggcgctcctcagcctccgtcttggctcagacgctcatgggacagagctgcccagccctccgtctgtgtggtttgaagcagaatttttccaccacatcctccactggacacccatcccaaatcagtctgaaagtacctgctatgaagtggcgctcctgaggtatggaatagagtcctggaactccatctccaactgtagccagaccctgtcctatgaccttaccgcagtgaccttggacctgtaccacagcaatggctaccgggccagagtgcgggctgtggacggcagccggcactccaactggaccgtcaccaacacccgcttctctgtggatgaagtgactctgacagttggcagtgtgaacctagagatccacaatggcttcatcctcgggaagattcagctacccaggcccaagatggcccccgcgaatgacacatatgaaagcatcttcagtcacttccgagagtatgagattgccattcgcaaggtgccgggaaacttcacgttcacacacaagaaagtaaaacatgaaaacttcagcctcctaacctctggagaagtgggagagttctgtgtccaggtgaaaccatctgtcgcttcccgaagtaacaaggggatgtggtctaaagaggagtgcatctccctcaccaggcagtatttcaccgtgaccaacgtcatcatcttctttgcctttgtcctgctgctctccggagccctcgcctactgcctggccctccagctgtatgtgcggcgccgaaagaagctacccagtgtcctgctcttcaagaagcccagccccttcatcttcatcagccagcgtccctccccagagacccaagacaccatccacccgcttgatgaggaggcctttttgaaggtgtccccagagctgaagaacttggacctgcacggcagcacagacagtggctttggcagcaccaagccatccctgcagactgaagagccccagttcctcctccctgaccctcacccccaggctgacagaacgctgggaaacggggagccccctgtgctgggggacagctgcagtagtggcagcagcaatagcacagacagcgggatctgcctgcaggagcccagcctgagccccagcacagggcccacctgggagcaacaggtggggagcaacagcaggggccaggatgacagtggcattgacttagttcaaaactctgagggccgggctggggacacacagggtggctcggccttgggccaccacagtcccccggagcctgaggtgcctggggaagaagacccagctgctgtggcattccagggttacctgaggcagaccagatgtgctgaagagaaggcaaccaagacaggctgcctggaggaagaatcgcccttgacagatggccttggccccaaattcgggagatgcctggttgatgaggcaggcttgcatccaccagccctggccaagggctatttgaaacaggatcctctagaaatgactctggcttcctcaggggccccaacgggacagtggaaccagcccactgaggaatggtcactcctggccttgagcagctgcagtgacctgggaatatctgactggagctttgcccatgaccttgcccctctaggctgtgtggcagccccaggtggtctcctgggcagctttaactcagacctggtcaccctgcccctcatctctagcctgcagtcaagtgagtgactcgggctgagaggctgcttttgattttagccatgcctgctcctctgcctggaccaggaggagggccctggggcagaagttaggcacgaggcagtctgggcacttttctgcaagtccactggggctggcccagccaggctgcagggctggtcagggtgtctggggcaggaggaggccaactcactgaactagtgcagggtatgtgggtggcactgacctgttctgttgactggggccctgcagactctggcagagctgagaagggcagggaccttctccctcctaggaactctttcctgtatcataaaggattatttgctcaggggaaccatggggctttctggagttgtggtgaggccaccaggctgaagtcagctcagacccagacctccctgcttaggccactcgagcatcagagcttccagcaggaggaagggctgtaggaatggaagcttcagggccttgctgctggggtcatttttaggggaaaaaggaggatatgatggtcacatggggaacctcccctcatcgggcctctggggcaggaagcttgtcactggaagatcttaaggtatatattttctggacactcaaacacatcataatggattcactgaggggagacaaagggagccgagaccctggatggggcttccagctcagaacccatccctctggtgggtacctctggcacccatctgcaaatatctccctctctccaacaaatggagtagcatccccctggggcacttgctgaggccaagccactcacatcctcactttgctgccccaccatcttgctgacaacttccagagaagccatggttttttgtattggtcataactcagccctttgggcggcctctgggcttgggcaccagctcatgccagccccagagggtcagggttggaggcctgtgcttgtgtttgctgctaatgtccagctacagacccagaggataagccactgggcactgggctggggtccctgccttgttggtgttcagctgtgtgattttggactagccacttgtcagagggcctcaatctcccatctgtgaaataaggactccacctttaggggaccctccatgtttgctgggtattagccaagctggtcctgggagaatgcagatactgtccgtggactaccaagctggcttgtttcttatgccagaggctaacagatccaatgggagtccatggtgtcatgccaagacagtatcagacacagccccagaagggggcattatgggccctgcctccccataggccatttggactctgccttcaaacaaaggcagttcagtccacaggcatggaagctgtgaggggacaggcctgtgcgtgccatccagagtcatctcagccctgcctttctctggagcattctgaaaacagatattctggcccagggaatccagccatgacccccacccctctgccaaagtactcttaggtgccagtctggtaactgaactccctctggaggcaggcttgagggaggattcctcagggttcccttgaaagctttatttatttattttgttcatttatttattggagaggcagcattgcacagtgaaagaattctggatatctcaggagccccgaaattctagctctgactttgctgtttccagtggtatgaccttggagaagtcacttatcctcttggagcctcagtttcctcatctgcagaataatgactgacttgtctaattcatagggatgtgaggttctgctgaggaaatgggtatgaatgtgccttgaacacaaagctctgtcaataagtgatacatgttttttattccaataaattgtcaagaccaca

SEQ ID NO: 202 - protein, 578 aa, Homo sapiens
MLPCLVVLLAALLSLRLGSDAHGTELPSPPSVWFEAEFFHHILHWTPIPNQSESTCYEVALLRYGIESWNSISNCSQTLSYDLTAVTLDLYHSNGYRARVRAVDGSRHSNWTVTNTRFSVDEVTLTVGSVNLEIHNGFILGKIQLPRPKMAPANDTYESIFSHFREYEIAIRKVPGNFTFTHKKVKHENFSLLTSGEVGEFCVQVKPSVASRSNKGMWSKEECISLTRQYFTVTNVIIFFAFVLLLSGALAYCLALQLYVRRRKKLPSVLLFKKPSPFIFISQRPSPETQDTIHPLDEEAFLKVSPELKNLDLHGSTDSGFGSTKPSLQTEEPQFLLPDPHPQADRTLGNGEPPVLGDSCSSGSSNSTDSGICLQEPSLSPSTGPTWEQQVGSNSRGQDDSGIDLVQNSEGRAGDTQGGSALGHHSPPEPEVPGEEDPAAVAFQGYLRQTRCAEEKATKTGCLEEESPLTDGLGPKFGRCLVDEAGLHPPALAKGYLKQDPLEMTLASSGAPTGQWNQPTEEWSLLALSSCSDLGISDWSFAHDLAPLGCVAAPGGLLGSFNSDLVTLPLISSLQSSE

SEQ ID NO: 203 - DNA, 2113 bp, Homo sapiens
ggagttgagaattagggaggaggtggtagagtccgggtagtgagcggagggacaggaagggtagggcaagaaagggagaggggacaggagggaagggtgggccaaagcggtgagaaaggagggccagccagttgggtgggggagagggccgaggcccgggggcaggagtgcagggctctgaggcggggagaggagaggagagaagagccgcggggggcccagcccggagccaggatgcccgcgccgcgcgcccgggagcagccccgcgtgcccggggagcgccagccgctgctgcctcgcggtgcgcggggccctcgacggtggcggcgggcggcgggcgcggccgtgctgctggtggagatgctggagcgcgccgccttcttcggcgtcaccgccaacctcgtgctgtacctcaacagcaccaacttcaactggaccggcgagcaggcgacgcgcgccgcgctggtattcctgggcgcctcctacctgctggcgcccgtgggcggctggctggccgacgtgtacctgggccgctaccgcgcggtcgcgctcagcctgctgctctacctggccgcctcgggcctgctgcccgccaccgccttccccgacggccgcagctccttctgcggagagatgcccgcgtcgccgctgggacctgcctgcccctcggccggctgcccgcgctcctcgcccagcccctactgcgcgcccgtcctctacgcgggcctgctgctactcggcctggccgccagctccgtccggagcaacctcacctccttcggtgccgaccaggtgatggatctcggccgcgacgccacccgccgcttcttcaactggttttactggagcatcaacctgggtgctgtgctgtcgctgctggtggtggcgtttattcagcagaacatcagcttcctgctgggctacagcatccctgtgggctgtgtgggcctggcatttttcatcttcctctttgccacccccgtcttcatcaccaagcccccgatgggcagccaagtgtcctctatgcttaagctcgctctccaaaactgctgcccccagctgtggcaacgacactcggccagagaccgtcaatgtgcccgcgtgctggccgacgagaggtctccccagccaggggcttccccgcaagaggacatcgccaacttccaggtgctggtgaagatcttgcccgtcatggtgaccctggtgccctactggatggtctacttccagatgcagtccacctatgtcctgcagggtcttcacctccacatcccaaacattttcccagccaacccggccaacatctctgtggccctgagagcccagggcagcagctacacgatcccggaagcctggctcctcctggccaatgttgtggtggtgctgattctggtccctctgaaggaccgcttgatcgaccctttactgctgcggtgcaagctgcttccctctgctctgcagaagatggcgctggggatgttctttggttttacctccgtcattgtggcaggagtcctggagatggagcgcttacactacatccaccacaacgagaccgtgtcccagcagattggggaggtcctgtacaacgcggcaccactgtccatctggtggcagatccctcagtacctgctcattgggatcagtgagatctttgccagcatcccaggcctggagtttgcctactcagaggccccgcgctccatgcagggcgccatcatgggcatcttcttctgcctgtcgggggtgggctcactgttgggctccagcctagtggcactgctgtccttgcccgggggctggctgcactgccccaaggactttgggaacatcaacaattgccggatggacctctacttcttcctgctggctggcattcaggccgtcacggctctcctatttgtctggatcgctggacgctatgagagggcgtcccagggcccagcctcccacagccgtttcagcagggacaggggctgaacaggccctattccagcccccttgcttcactctaccggacagacggcagcagtcccagctctggtttccttctcggtttattctgttagaatgaaatggttcccataaataaggggcatgagcccttcctccc

SEQ ID NO: 204 - protein, 581 aa, Homo sapiens
MPAPRAREQPRVPGERQPLLPRGARGPRRWRRAAGAAVLLVEMLERAAFFGVTANLVLYLNSTNFNWTGEQATRAALVFLGASYLLAPVGGWLADVYLGRYRAVALSLLLYLAASGLLPATAFPDGRSSFCGEMPASPLGPACPSAGCPRSSPSPYCAPVLYAGLLLLGLAASSVRSNLTSFGADQVMDLGRDATRRFFNWFYWSINLGAVLSLLVVAFIQQNISFLLGYSIPVGCVGLAFFIFLFATPVFITKPPMGSQVSSMLKLALQNCCPQLWQRHSARDRQCARVLADERSPQPGASPQEDIANFQVLVKILPVMVTLVPYWMVYFQMQSTYVLQGLHLHIPNIFPANPANISVALRAQGSSYTIPEAWLLLANVVVVLILVPLKDRLIDPLLLRCKLLPSALQKMALGMFFGFTSVIVAGVLEMERLHYIHHNETVSQQIGEVLYNAAPLSIWWQIPQYLLIGISEIFASIPGLEFAYSEAPRSMQGAIMGIFFCLSGVGSLLGSSLVALLSLPGGWLHCPKDFGNINNCRMDLYFFLLAGIQAVTALLFVWIAGRYERASQGPASHSRFSRDRG

SEQ ID NO: 205 - DNA, 3155 bp, Homo sapiens
atggcttccccgcggagctccgggcagcccgggccgccgccgccgccgccaccgccgcccgcgcgcctgctactgctactgctgctgccgctgctgctgcctctggcgcccggggcctggggctgggcgcggggcgccccccggccgccgcccagcagcccgccgctctccatcatgggcctcatgccgctcaccaaggaggtggccaagggcagcatcgggcgcggtgtgctccccgccgtggaactggccatcgagcagatccgcaacgagtcactcctgcgcccctacttcctcgacctgcggctctatgacacggagtgcgacaacgcaaaagggttgaaagccttctacgatgcaataaaatacgggccgaaccacttgatggtgtttggaggcgtctgtccatccgtcacatccatcattgcagagtccctccaaggctggaatctggtgcagctttcttttgctgcaaccacgcctgttctagccgataagaaaaaatacccttatttctttcggaccgtcccatcagacaatgcggtgaatccagccattctgaagttgctcaagcactaccagtggaagcgcgtgggcacgctgacgcaagacgttcagaggttctctgaggtgcggaatgacctgactggagttctgtatggcgaggacattgagatttcagacaccgagagcttctccaacgatccctgtaccagtgtcaaaaagctgaaggggaatgatgtgcggatcatccttggccagtttgaccagaatatggcagcaaaagtgttctgttgtgcatacgaggagaacatgtatggtagtaaatatcagtggatcattccgggctggtacgagccttcttggtgggagcaggtgcacacggaagccaactcatcccgctgcctccggaagaatctgcttgctgccatggagggctacattggcgtggatttcgagcccctgagctccaagcagatcaagaccatctcaggaaagactccacagcagtatgagagagagtacaacaacaagcggtcaggcgtggggcccagcaagttccacgggtacgcctacgatggcatctgggtcatcgccaagacactgcagagggccatggagacactgcatgccagcagccggcaccagcggatccaggacttcaactacacggaccacacgctgggcaggatcatcctcaatgccatgaacgagaccaacttcttcggggtcacgggtcaagttgtattccggaatggggagagaatggggaccattaaatttactcaatttcaagacagcagggaggtgaaggtgggagagtacaacgctgtggccgacacactggagatcatcaatgacaccatcaggttccaaggatccgaaccaccaaaagacaagaccatcatcctggagcagctgcggaagatctccctacctctctacagcatcctctctgccctcaccatcctcgggatgatcatggccagtgcttttctcttcttcaacatcaagaaccggaatcagaagctcataaagatgtcgagtccatacatgaacaaccttatcatccttggagggatgctctcctatgcttccatatttctctttggccttgatggatcctttgtctctgaaaagacctttgaaacactttgcaccgtcaggacctggattctcaccgtgggctacacgaccgcttttggggccatgtttgcaaagacctggagagtccacgccatcttcaaaaatgtgaaaatgaagaagaagatcatcaaggaccagaaactgcttgtgatcgtggggggcatgctgctgatcgacctgtgtatcctgatctgctggcaggctgtggaccccctgcgaaggacagtggagaagttcagcatggagccggacccagcaggacgggatatctccatccgccctctcctggagcactgtgagaacacccatatgaccatctggcttggcatcgtctatgcctacaagggacttctcatgttgttcggttgtttcttagcttgggagacccgcaacgtcagcatccccgcactcaacgacagcaagtacatcgggatgagtgtctacaacgtggggatcatgtgcatcatcggggccgctgtctccttcctgacccgggaccagcccaatgtgcagttctgcatcgtggctctggtcatcatcttctgcagcaccatcaccctctgcctggtattcgtgccgaagctcatcaccctgagaacaaacccagatgcagcaacgcagaacaggcgattccagttcactcagaatcagaagaaagaagattctaaaacgtccacctcggtcaccagtgtgaaccaagccagcacatcccgcctggagggcctacagtcagaaaaccatcgcctgcgaatgaagatcacagagctggataaagacttggaagaggtcaccatgcagctgcaggacacaccagaaaagaccacctacattaaacagaaccactaccaagagctcaatgacatcctcaacctgggaaacttcactgagagcacagatggaggaaaggccattttaaaaaatcacctcgatcaaaatccccagctacagtggaacacagcagagccctctcgaacatgcaaagatcctatagaagatataaactctccagaacacatccagcgtcggctgtccctccagctccccatcctccaccacgcctacctcccatccatcggaggcgtggacgccagctgtgtcagcccctgcgtcagccccaccgccagcccccgccacagacatgtgccaccctccttccgagtcatggtctcgggcctgtaagggtgggaggcctgggcccggggcctcccccgtgacagaaccacactgggcagaggggtctgctgcagaaacactgtcggctctggctgcggagaagctgggcaccatggctggcctctcaggaccactcggatggcactcaggtggacaggacggggcagggggagacttggcacctgacctcgagccttatttgtgaagtccttatttcttcacaaagaagaggaacggaaatgggacgtcttccttaacatctgcaaacaaggaggcgctgggatatcaaacttgcaaaaaaaaaaaaaaaacaaaacaaaaaaaaaaaaaaaaaa

SEQ ID NO: 206 - protein, 941 aa, Homo sapiens
MASPRSSGQPGPPPPPPPPPARLLLLLLLPLLLPLAPGAWGWARGAPRPPPSSPPLSIMGLMPLTKEVAKGSIGRGVLPAVELAIEQIRNESLLRPYFLDLRLYDTECDNAKGLKAFYDAIKYGPNHLMVFGGVCPSVTSIIAESLQGWNLVQLSFAATTPVLADKKKYPYFFRTVPSDNAVNPAILKLLKHYQWKRVGTLTQDVQRFSEVRNDLTGVLYGEDIEISDTESFSNDPCTSVKKLKGNDVRIILGQFDQNMAAKVFCCAYEENMYGSKYQWIIPGWYEPSWWEQVHTEANSSRCLRKNLLAAMEGYIGVDFEPLSSKQIKTISGKTPQQYEREYNNKRSGVGPSKFHGYAYDGIWVIAKTLQRAMETLHASSRHQRIQDFNYTDHTLGRIILNAMNETNFFGVTGQVVFRNGERMGTIKFTQFQDSREVKVGEYNAVADTLEIINDTIRFQGSEPPKDKTIILEQLRKISLPLYSILSALTILGMIMASAFLFFNIKNRNQKLIKMSSPYMNNLIILGGMLSYASIFLFGLDGSFVSEKTFETLCTVRTWILTVGYTTAFGAMFAKTWRVHAIFKNVKMKKKIIKDQKLLVIVGGMLLIDLCILICWQAVDPLRRTVEKFSMEPDPAGRDISIRPLLEHCENTHMTIWLGIVYAYKGLLMLFGCFLAWETRNVSIPALNDSKYIGMSVYNVGIMCIIGAAVSFLTRDQPNVQFCIVALVIIFCSTITLCLVFVPKLITLRTNPDAATQNRRFQFTQNQKKEDSKTSTSVTSVNQASTSRLEGLQSENHRLRMKITELDKDLEEVTMQLQDTPEKTTYIKQNHYQELNDILNLGNFTESTDGGKAILKNHLDQNPQLQWNTAEPSRTCKDPIEDINSPEHIQRRLSLQLPILHHAYLPSIGGVDASCVSPCVSPTASPRHRHVPPSFRVMVSGL

SEQ ID NO: 207 - DNA, 2767 bp, Homo sapiens
gcggagggtgcgtgcgggccgcggcagccgaacaaaggagcaggggcgccgccgcagggacccgccacccacctcccggggccgcgcagcggcctctcgtctactgccaccatgaccgccaacggcacagccgaggcggtgcagatccagttcggcctcatcaactgcggcaacaagtacctgacggccgaggcgttcgggttcaaggtgaacgcgtccgccagcagcctgaagaagaagcagatctggacgctggagcagccccctgacgaggcgggcagcgcggccgtgtgcctgcgcagccacctgggccgctacctggcggcggacaaggacggcaacgtgacctgcgagcgcgaggtgcccggtcccgactgccgtttcctcatcgtggcgcacgacgacggtcgctggtcgctgcagtccgaggcgcaccggcgctacttcggcggcaccgaggaccgcctgtcctgcttcgcgcagacggtgtcccccgccgagaagtggagcgtgcacatcgccatgcaccctcaggtcaacatctacagtgtcacccgtaagcgctacgcgcacctgagcgcgcggccggccgacgagatcgccgtggaccgcgacgtgccctggggcgtcgactcgctcatcaccctcgccttccaggaccagcgctacagcgtgcagaccgccgaccaccgcttcctgcgccacgacgggcgcctggtggcgcgccccgagccggccactggctacacgctggagttccgctccggcaaggtggccttccgcgactgcgagggccgttacctggcgccgtcggggcccagcggcacgctcaaggcgggcaaggccaccaaggtgggcaaggacgagctctttgctctggagcagagctgcgcccaggtcgtgctgcaggcggccaacgagaggaacgtgtccacgcgccagggtatggacctgtctgccaatcaggacgaggagaccgaccaggagaccttccagctggagatcgaccgcgacaccaaaaagtgtgccttccgtacccacacgggcaagtactggacgctgacggccaccgggggcgtgcagtccaccgcctccagcaagaatgccagctgctactttgacatcgagtggcgtgaccggcgcatcacactgagggcgtccaatggcaagtttgtgacctccaagaagaatgggcagctggccgcctcggtggagacagcaggggactcagagctcttcctcatgaagctcatcaaccgccccatcatcgtgttccgcggggagcatggcttcatcggctgccgcaaggtcacgggcaccctggacgccaaccgctccagctatgacgtcttccagctggagttcaacgatggcgcctacaacatcaaagactccacaggcaaatactggacggtgggcagtgactccgcggtcaccagcagcggcgacactcctgtggacttcttcttcgagttctgcgactataacaaggtggccatcaaggtgggcgggcgctacctgaagggcgaccacgcaggcgtcctgaaggcctcggcggaaaccgtggaccccgcctcgctctgggagtactagggccggcccgtccttccccgcccctgcccacatggcggctcctgccaaccctccctgctaaccccttctccgccaggtgggctccagggcgggaggcaagcccccttgcctttcaaactggaaaccccagagaaaacggtgcccccacctgtcgcccctatggactccccactctcccctccgcccgggttccctactcccctcgggtcagcggctgcggcctggccctgggagggatttcagatgcccctgccctcttgtctgccacggggcgagtctggcacctctttcttctgacctcagacggctctgagccttatttctctggaagcggctaagggacggttgggggctgggagccctgggcgtgtagtgtaactggaatcttttgcctctcccagccacctcctcccagccccccaggagagctgggcacatgtcccaagcctgtcagtggccctccctggtgcactgtccccgaaacccctgcttgggaagggaagctgtcgggagggctaggactgacccttgtggtgtttttttgggtggtggctggaaacagcccctctcccacgtgggagaggctcagcctggctcccttccctggagcggcagggcgtgacggccacagggtctgcccgctgcacgttctgccaaggtggtggtggcgggcgggtaggggtgtgggggccgtcttcctcctgtctctttcctttcaccctagcctgactggaagcagaaaatgaccaaatcagtattttttttaatgaaatattattgctggaggcgtcccaggcaagcctggctgtagtagcgagtgatctggcggggggcgtctcagcaccctccccagggggtgcatctcagccccctctttccgtccttcccgtccagccccagccctgggcctgggctgccgacacctgggccagagcccctgctgtgattggtgctccctgggcctcccgggtggatgaagccaggcgtcgccccctccgggagccctggggtgagccgccggggcccccctgctgccagcctcccccgtccccaacatgcatctcactctgggtgtcttggtcttttattttttgtaagtgtcatttgtataactctaaacgcccatgatagtagcttcaaactggaaatagcgaaataaaataactcagtctgc

SEQ ID NO: 208 - protein, 493 aa, Homo sapiens
MTANGTAEAVQIQFGLINCGNKYLTAEAFGFKVNASASSLKKKQIWTLEQPPDEAGSAAVCLRSHLGRYLAADKDGNVTCEREVPGPDCRFLIVAHDDGRWSLQSEAHRRYFGGTEDRLSCFAQTVSPAEKWSVHIAMHPQVNIYSVTRKRYAHLSARPADEIAVDRDVPWGVDSLITLAFQDQRYSVQTADHRFLRHDGRLVARPEPATGYTLEFRSGKVAFRDCEGRYLAPSGPSGTLKAGKATKVGKDELFALEQSCAQVVLQAANERNVSTRQGMDLSANQDEETDQETFQLEIDRDTKKCAFRTHTGKYWTLTATGGVQSTASSKNASCYFDIEWRDRRITLRASNGKFVTSKKNGQLAASVETAGDSELFLMKLINRPIIVFRGEHGFIGCRKVTGTLDANRSSYDVFQLEFNDGAYNIKDSTGKYWTVGSDSAVTSSGDTPVDFFFEFCDYNKVAIKVGGRYLKGDHAGVLKASAETVDPASLWEY

SEQ ID NO: 209 - DNA, 1776 bp, Homo sapiens
tttcatttcctcactgactataaaagaatagagaaggaagggcttcagtgaccggctgcctggctgacttacagcagtcagactctgacaggatcatggctatgatggaggtccaggggggacccagcctgggacagacctgcgtgctgatcgtgatcttcacagtgctcctgcagtctctctgtgtggctgtaacttacgtgtactttaccaacgagctgaagcagatgcaggacaagtactccaaaagtggcattgcttgtttcttaaaagaagatgacagttattgggaccccaatgacgaagagagtatgaacagcccctgctggcaagtcaagtggcaactccgtcagctcgttagaaagatgattttgagaacctctgaggaaaccatttctacagttcaagaaaagcaacaaaatatttctcccctagtgagagaaagaggtcctcagagagtagcagctcacataactgggaccagaggaagaagcaacacattgtcttctccaaactccaagaatgaaaaggctctgggccgcaaaataaactcctgggaatcatcaaggagtgggcattcattcctgagcaacttgcacttgaggaatggtgaactggtcatccatgaaaaagggttttactacatctattcccaaacatactttcgatttcaggaggaaataaaagaaaacacaaagaacgacaaacaaatggtccaatatatttacaaatacacaagttatcctgaccctatattgttgatgaaaagtgctagaaatagttgttggtctaaagatgcagaatatggactctattccatctatcaagggggaatatttgagcttaaggaaaatgacagaatttttgtttctgtaacaaatgagcacttgatagacatggaccatgaagccagttttttcggggcctttttagttggctaactgacctggaaagaaaaagcaataacctcaaagtgactattcagttttcaggatgatacactatgaagatgtttcaaaaaatctgaccaaaacaaacaaacagaaaacagaaaacaaaaaaacctctatgcaatctgagtagagcagccacaaccaaaaaattctacaacacacactgttctgaaagtgactcacttatcccaagagaatgaaattgctgaaagatctttcaggactctacctcatatcagtttgctagcagaaatctagaagactgtcagcttccaaacattaatgcaatggttaacatcttctgtctttataatctactccttgtaaagactgtagaagaaagagcaacaatccatctctcaagtagtgtatcacagtagtagcctccaggtttccttaagggacaacatccttaagtcaaaagagagaagaggcaccactaaaagatcgcagtttgcctggtgcagtggctcacacctgtaatcccaacattttgggaacccaaggtgggtagatcacgagatcaagagatcaagaccatagtgaccaacatagtgaaaccccatctctactgaaagtacaaaaattagctgggtgtgttggcacatgcctgtagtcccagctacttgagaggctgaggcaagagaattgtttgaacccgggaggcagaggttgcagtgtggtgagatcatgccactacactccagcctggcgacagagcgagacttggtttcaaaaaaaaaaaaaaaaaaaacttcagtaagtacgtgttatttttttcaataaaattctattacagtatgtcaaaaaaaaaaaaaaaaaa

SEQ ID NO: 210 - protein, 281 aa, Homo sapiens [sequence omitted]

SEQ ID NO: 211 - DNA, 1535 bp, Homo sapiens
cctccgctcagtccgggagcgcacgtgggccgcggcgctccgacctccgctttcccaccgcccgcagctgaagcacatcccgcagcccggcgcggactccgatcgccgcagttgccctctggcgccatgtcgcagaacggagcgcccgggatgcaggaggagagcctgcagggctcctgggtagaactgcacttcagcaataatgggaacgggggcagcgttccagcctcggtttctatttataatggagacatggaaaaaatactgctggacgcacagcatgagtctggacggagtagctccaagagctctcactgtgacagcccacctcgctcgcagacaccacaagataccaacagggcttctgaaacagatacccatagcattggagagaaaaacagctcacagtctgaggaagatgatattgaaagaaggaaagaagttgaaagcatcttgaagaaaaactcagattggatatgggattggtcaagtcggccggaaaatattccccccaaggagttcctctttaaacacccgaagcgcacggccaccctcagcatgaggaacacgagcgtcatgaagaaagggggcatattctctgcagaatttctgaaagttttccttccatctctgctgctctctcatttgctggccatcggattggggatctatattggaaggcgtctgacaacctccaccagcaccttttgatgaagaactggagtctgacttggttcgttagtggattacttctgagcttgcaacatagctcactgaagagctgttagatcctggggtggccacgtcacttgtgtttatttgttctgtaaatgctgcgttcctaatttagtaaaataaaagaatagacactaaaatcatgttgatctataattacacctatgggatcaataagcatgtcagactgattaatgtctactgtgaaaatttggtagtaaattttcatttgatattagatataaatatctgaatataaataattttaatatactagtcatgatgtgtgttgtattttaaaaattatctgcaaccttaattcagctgaagtactttatatttcaaaagaatgaataacattgataataaaatcgctactttaaggggtttgtccaaaataaatattgtggccttatatatcacactattgtagaaagtattatttaatttaaatggatgcaggttgtctactaaagaaagattatatataactatgctaattgttcataatcaacagaaaccaagatagagctacaaactcagctgtacagttcgtacactaaactcttcttgcttttgcattataaggaattaagtctccgattattaggtgatcaccctggatgatcagttttctgctgaaggcacctactcagtatcttttcctctttatcactctgcattggtgaatttaatcctctcctttgtgttcaacttttgtgtgcttttaaaatcagctttattctaagcaaatctgtgtctactttaaaaaactggaaatggaaaaaaaaataaatctt

SEQ ID NO: 212 - protein, 194 aa, Homo sapiens
MSQNGAPGMQEESLQGSWVELHFSNNGNGGSVPASVSIYNGDMEKILLDAQHESGRSSSKSSHCDSPPRSQTPQDTNRASETDTHSIGEKNSSQSEEDDIERRKEVESILKKNSDWIWDWSSRPENIPPKEFLFKHPKRTATLSMRNTSVMKKGGIFSAEFLKVFLPSLLLSHLLAIGLGIYIGRRLTTSTSTF

SEQ ID NO: 213 - DNA, 2327 bp, Homo sapiens
ggcacgaggggctgccccctccgccaccgccgccgcccgccggcaggttccctggtcagcgtcccatcccggtcgggagttctctccaggcggcacgatgccgaggaaacagtgaccctgagcgaagccaagccgggcggcaggaacttctgcaatgtcccatcaacctctcagctgcctcactgaaaaggaggacagccccagtgaaagcacaggaaatggacccccccacctggcccacccaaacctggacacgtttaccccggaggagctgctgcagcagatgaaagagctcctgaccgagaaccaccagctgaaagaagccatgaagctaaataatcaagccatgaaagggagatttgaggagctttcggcctggacagagaaacagaaggaagaacgccagttttttgagatacagagcaaagaagcaaaagagcgtctaatggccttgagtcatgagaatgagaaattgaaggaagagcttggaaaactaaaagggaaatcagaaaggtcatctgaggaccccactgatgactccaggcttcccagggccgaagcggagcaggaaaaggaccagctcaggacccaggtggtgaggctacaagcagagaaggcagacctgttgggcatcgtgtctgaactgcagctcaagctgaactccagcggctcctcagaagattcctttgttgaaattaggatggctgaaggagaagcagaagggtcagtaaaagaaatcaagcatagtcctgggcccacgagaacagtctccactggcacggcattgtctaaatataggagcagatctgcagatggggccaagaattacttcgaacatgaggagttaactgtgagccagctcctgctgtgcctaagggaagggaatcagaaggtggagagacttgaagttgcactcaaggaggccaaagaaagagtttcagattttgaaaagaaaacaagtaatcgttctgagattgaaacccagacagaggggagcacagagaaagagaatgatgaagagaaaggcccggagactgttggaagcgaagtggaagcactgaacctccaggtgacatctctgtttaaggagcttcaagaggctcatacaaaactcagcgaagctgagctaatgaagaagagacttcaagaaaagtgtcaggcccttgaaaggaaaaattctgcaattccatcagagttgaatgaaaagcaagagcttgtttatactaacaaaaagttagagctacaagtggaaagcatgctatcagaaatcaaaatggaacaggctaaaacagaggatgaaaagtccaaattaactgtgctacagatgacacacaacaagcttcttcaagaacataataatgcattgaaaacaattgaggaactaacaagaaaagagtcagaaaaagtggacagggcagtgctgaaggaactgagtgaaaaactggaactggcagagaaggctctggcttccaaacagctgcaaatggatgaaatgaagcaaaccattgccaagcaggaagaggacctggaaaccatgaccatcctcagggctcagatggaagtttactgttctgattttcatgctgaaagagcagcgagagagaaaattcatgaggaaaaggagcaactggcattgcagctggcagttctgctgaaagagaatgatgctttcgaagacggaggcaggcagtccttgatggagatgcagagtcgtcatggggcgagaacaagtgactctgaccagcaggcttaccttgttcaaagaggagctgaggacagggactggcggcaacagcggaatattccgattcattcctgccccaagtgtggagaggttctgcctgacatagacacgttacagattcacgtgatggattgcatcatttaagtgttgatgtatcacctccccaaaactgttggtaaatgtcagattttttcctccaagagttgtgcttttgtgttatttgttttcactcaaatattttgcctcattattcttgttttaaaagaaagaaaacaggccgggcacagtggctcatgcctgtaatcccagcactttgggaggtcgaggtgggtggatcacttggggtcagggtttgagaccagcctggccaacatggcggaaccctgtctctaccaaaattacaaaaattagccgagcatggtggcgcatgcctgtagtcgcagctactcgcgaggttgaggcaggagaattgcttgaacccaggaagtggcagttgcagtgagccgagacgacaccactgcactccagcctgggtgacagagggagactctgtctcgaaagaaaaaaaaaaaaaaaaaaaaaa

SEQ ID NO: 214 - protein, 577 aa, Homo sapiens
MSHQPLSCLTEKEDSPSESTGNGPPHLAHPNLDTFTPEELLQQMKELLTENHQLKEAMKLNNQAMKGRFEELSAWTEKQKEERQFFEIQSKEAKERLMALSHENEKLKEELGKLKGKSERSSEDPTDDSRLPRAEAEQEKDQLRTQVVRLQAEKADLLGIVSELQLKLNSSGSSEDSFVEIRMAEGEAEGSVKEIKHSPGPTRTVSTGTALSKYRSRSADGAKNYFEHEELTVSQLLLCLREGNQKVERLEVALKEAKERVSDFEKKTSNRSEIETQTEGSTEKENDEEKGPETVGSEVEALNLQVTSLFKELQEAHTKLSEAELMKKRLQEKCQALERKNSAIPSELNEKQELVYTNKKLELQVESMLSEIKMEQAKTEDEKSKLTVLQMTHNKLLQEHNNALKTIEELTRKESEKVDRAVLKELSEKLELAEKALASKQLQMDEMKQTIAKQEEDLETMTILRAQMEVYCSDFHAERAAREKIHEEKEQLALQLAVLLKENDAFEDGGRQSLMEMQSRHGARTSDSDQQAYLVQRGAEDRDWRQQRNIPIHSCPKCGEVLPDIDTLQIHVMDCII

SEQ ID NO: 215 - DNA, 1814 bp, Homo sapiens
ctcccgccccggggaggttttgattttagtggctttcttccttttattttccgtcgtgtgcggatttcgctgcagagcgaacttgcggctcgtcggagtacatgtgagcggtaatcgcccctgcagctggttatcctgacactatgcactccgaagcagaagaatccaaggaagtggccacagatgtctttaattccaaaaacctggccgttcaggcacaaaagaagatcttgggtaaaatggtgtccaaatccatcgccaccaccttaatagacgacacaagtagtgaggtgctggacgagctctacagagtgaccagggagtacacccaaaacaagaaggaggcagagaagatcatcaagaacctcatcaagacagtcatcaagctggccattctttataggaataatcagtttaatcaagatgagctagcattgatggagaaatttaagaagaaagttcatcagcttgctatgaccgtggtcagtttccatcaggtggattatacctttgaccggaatgtgttatccaggctgttaaatgaatgcagagagatgctgcaccaaatcattcagcgccacctcactgccaagtcacatggacgggttaataatgtctttgatcatttttcagattgtgaatttttggctgccttgtataatccttttgggaattttaaaccccacttacaaaaactatgtgatggtatcaacaaaatgttggatgaagagaacatatgagcacatgagttaagattgtgactgatcatgatttatttgaagatggagcactgctgatttatgaaggaaaaaagaagaattttctaaagattacacatatttcagaaagactttacccaattcagttgtcagacataatgatttatttgaaggcttgttttatttgaagaaaagcatattgccaaaaattctggttaaaagcttcctaatgggtaacagaccatgggagagatatgtggttgggtaatgcgaatgtagttatacaaagaaaaatacagatgtctccagacctgaggactttttaatagggcggttgttgtgttggtggcacattggatatttctaacatgtacaaagctatgtattttgatttactttcatttcttgctatgtatatgtacttttcttaaaatgccaagaactttctcttgctatcattgctccttttgaaacaattcaattttcatgtctacagctgactgttttgttaagattgagtcatcgacattcaggatttaagtctgaggtagtcaaccctcaggaaaaaaaaaatggcttatctgaaatcagtactgtggaaatgaactatattagctattatgaataatgtccagtataagaatatgcttctggaattgagttctccttttaagtaccaatgatacttaaatttctcagaaatgtaatggtgtgtcattgccttgaaatgcttgcttagggcttcttttatgttatcttaaaaagtgctggtgaattttccattttttacatccatttcacatgtaagagacaaaaaagtctagattggtcttgatattgagataataaaaagtaagtagcattaagaaaggtaacaatcttcattctacagatgaactcattgaaacaatttaggggaatgaggggcaaaaggggagaaatactgctaaagaacatgagcataaaaacgcgtgcgtttcagtgtttaagaaggcttgataaagaatgtcacttttttatttaactgataagatttttgttattttttactttgataagtaaaccaaaaaaaaaaaaaaaaaaaaaaaaaaaaaa

SEQ ID NO: 216 - protein, 198 aa, Homo sapiens; identical to SEQ ID NO: 40

SEQ ID NO: 217 - DNA, 2003 bp, Homo sapiens
gctcgtccgagtacatgtgagcggtaatcgcccctgcagctggttatcctgacattatgcactccgaagcagaagaatccaaggaaggcctaggcttaaacactggcatatatggagagaacagttgccactcgactcagagattgagtagacacccaaagaactgcagttcttaagccttaggagaagcgagagaaatggcagtggccacagatgtctttaattccaaaaacctggccgttcaggcacaaaagaagatcttgggtaaaatggtgtccaaatccatcgccaccaccttaatagacgacacaagtagtgaggtgctggatgagctctacagagtgaccagggagtacacccaaaacaagaaggaggcagagaagatcatcaagaacctcatcaagacagtcatcaagctggccattctttataggaataatcagtttaatcaagatgagctagcattgatggagaaatttaagaagaaagttcatcagcttgctatgaccgtggtcagtttccatcaggtggattatacctttgaccggaatgtgttatccaggctgttaaatgaatgcagagagatgctgcaccaaatcattcagcgccacctcactgccaagtcacatggacgggttaataatgtgtttgatcatttttcagattgtgaatttttggctgccttgtataatccttttgggaattttaaaccccacttacaaaaactatgtgatggtatcaacaaaatgttggatgaagagaacatatgagcacatgagttaagattgtgactgatcatgatttatttgaagatggagcactgctgatttatgaaggaaaaaagaagaattttctaaagattacacatatttcagaaagactttacccaattcagttgtcagacataatgatttatttgaaggcttgttttatttgaagaaaagcatattgccaaaaattctggttaaaagcttcctaacgggtaacagaccatgggagagatatgtggttgggtaatgcaaatgtagttatacaaagaaaaatacagatgtctccagacctgaggactttttaatagggcagttgttgtgttggtggcacattggatatttctaacatgtacaaagctatgtattttgatttactttcatttcttgctatgtatatgtacttttcttaaaatgccaagaactttctcttgctatcattgctccttttgaaacaattcaattttcatgtctacagctgactgttttgttaagattgagtcatcgacattcaggatttaagtctgaggtagtcaaccctcaggaaaaaaaaatggcttatctgaaatcagtactgtggaaatgaactatattagctattatgaataatgtccagtataagaatatgcttctggaattgagttctccttttaagtaccaatgatacttaaatttctcagaaatgtaatggtgtgtcattgccttgaaatgcttgcttagggcttcttttatgttatcttaaaaagtgctggtgaattttccattttttacatccatttcacatgtaagagacacaaaagtctagattggtcttgatattgagataataaaaagtaagtagcattaagaaaggtaacaatcttcattctacagatgaactcattgaaacaatttaggggaatgaggggcaaaaggggagaaatactgctaaagaacatgagcataaaaatgcgtgcgtttcagtgtttaagaaggcttgataaagaatgtcacttttttatttaactgataagatttttgttattttttactttgataagtaaaccaaagaatatttgtatttcaagcagtttgtgtggtgtttctatataattttctgtgtataaataataaagtaggcatttgtttattttgtaaaaaagaaatgaaaatctgctggccagctatgtcctctaggaaatgacagacccaaccaccagcaataaacatttccattgtcaaaaaaaaaaaaaaaaa

SEQ ID NO: 218 - protein, 190 aa, Homo sapiens
MAVATDVFNSKNLAVQAQKKILGKMVSKSIATTLIDDTSSEVLDELYRVTREYTQNKKEAEKIIKNLIKTVIKLAILYRNNQFNQDELALMEKFKKKVHQLAMTVVSFHQVDYTFDRNVLSRLLNECREMLHQIIQRHLTAKSHGRVNNVFDHFSDCEFLAALYNPFGNFKPHLQKLCDGINKMLDEENI

SEQ ID NO: 219 - DNA, 1714 bp, Homo sapiens
ggggcattttgtgcctgcctagctatccagacagagcagctaccctcagctctagctgatactacagacagtacaacagatcaagaagtatggcagtgacaactcgtttgacacggttgcacgaaaagatcctgcaaaatcattttggagggaagcggcttagccttctctataagggtagtgtccatggattccgtaatggagttttgcttgacagatgttgtaatcaagggcctactctaacagtgatttatagtgaagatcatattattggagcatatgcggaagagagttaccaggaaggaaagtatgcttccatcatcctttttgcacttcaagatactaaaatttcagaatggaaactaggactatgtacaccagaaacactgttttgttgtgatgttacaaaatataactccccaactaatttccagatagatggaagaaatagaaaagtgattatggacttaaagacaatggaaaatcttggacttgctcaaaattgtactatctctattcaggattatgaagtttttcgatgcgaagattcactggatgaaagaaagataaaaggggtcattgagctcaggaagagcttactgtctgccttgagaacttatgaaccatatggatccctggttcaacaaatacgaattctgctgctgggtccaattggagctgggaagtccagctttttcaactcagtgaggtctgttttccaagggcatgtaacgcatcaggctttggtgggcactaatacaactgggatatctgagaagtataggacatactctattagagacgggaaagatggcaaatacctgccgtttattctgtgtgactcactggggctgagtgagaaagaaggcggcctgtgcagggatgacatattctatatcttgaacggtaacattcgtgatagataccagtttaatcccatggaatcaatcaaattaaatcatcatgactacattgattccccatcgctgaaggacagaattcattgtgtggcatttgtatttgatgccagctctattcaatacttctcctctcagatgatagtaaagatcaaaagaattcgaagggagttggtaaacgctggtgtggtacatgtggctttgctcactcatgtggatagcatggatttgattacaaaaggtgaccttatagaaatagagagatgtgagcctgtgaggtccaagctagaggaagtccaaagaaaacttggatttgctctttctgacatctcggtggttagcaattattcctctgagtgggagctggaccctgtaaaggatgttctaattctttctgctctgagacgaatgctatgggctgcagatgacttcttagaggatttgccttttgagcaaatagggaatctaagggaggaaattatcaactgtgcacaaggaaaaaaatagatatgtgaaaggttcacgtaaatttcctcacatcacagaagattaaaattcagaaaggagaaaacacagaccaaagagaagtatctaagaccaaagggatgtgttttattaatgtctaggatgaagaaatgcatagaacattgtagtacttgtaaataactagaaataacatgatttagtcataattgtgaaaaatagtaataatttttcttggatttatgttctgtatctgtgaaaaaataaatttcttataaaactcggaaaaaaaaaaaaaaaaaaaaaaaaaaaaa

SEQ ID NO: 220 - protein, 444 aa, Homo sapiens
MAVTTRLTRLHEKILQNHFGGKRLSLLYKGSVHGFRNGVLLDRCCNQGPTLTVIYSEDHIIGAYAEESYQEGKYASIILFALQDTKISEWKLGLCTPETLFCCDVTKYNSPTNFQIDGRNRKVIMDLKTMENLGLAQNCTISIQDYEVFRCEDSLDERKIKGVIELRKSLLSALRTYEPYGSLVQQIRILLLGPIGAGKSSFFNSVRSVFQGHVTHQALVGTNTTGISEKYRTYSIRDGKDGKYLPFILCDSLGLSEKEGGLCRDDIFYILNGNIRDRYQFNPMESIKLNHHDYIDSPSLKDRIHCVAFVFDASSIQYFSSQMIVKIKRIRRELVNAGVVHVALLTHVDSMDLITKGDLIEIERCEPVRSKLEEVQRKLGFALSDISVVSNYSSEWELDPVKDVLILSALRRMLWAADDFLEDLPFEQIGNLREEIINCAQGKK

SEQ ID NO: 221 - DNA, 2359 bp, Homo sapiens
gttttgcctgctagcatctccctgtaactctcccaatcttgaggagtgatccctgtcccagcccctggaaaggggcaggaacgacaaactcaaagtccaggatgttcaccatgacaagagccatggaagaggctctttttcagcacttcatgcaccagaagctggggatcgcctatgccatacacaagccatttcccttctttgaaggcctcctagacaactccatcatcactaagagaatgtacatggaatctctggaagcctgtagaaatttgatccctgtatccagagtggtgcacaacattctcacccaactggagaggacttttaacctgtctcttctggtgacattgttcagtcaaattaacctgcgtgaatatcccaatctggtgacgatttacagaagcttcaaacgtgttggtgcttcctatgaacggcagagcagagacacaccaatcctacttgaagccccaactggcctagcagaaggaagctccctccataccccactggcgctgcccccaccacaaccccctcaaccaagctgttcaccctgtgcgccaagagtcagtgagcctggaacatcctcccagcaaagcgatgagatcctgagtgagtcgcccagcccatctgaccctgtcctgcctctccctgcactcatccaggaaggaagaagcacttcagtgaccaatgacaagttaacatccaaaatgaatgcggaagaagactcagaagagatgcccagcctcctcactagcactgtgcaagtggccagtgacaacctgatcccccaaataagagataaagaagaccctcaagagatgccccactctcccttgggctctatgccagagataagagataattctccagaaccaaatgacccagaagagccccaggaggtgtccagcacaccttcagacaagaaaggaaagaaaagaaaaagatgtatctggtcaactccaaaaaggagacataagaaaaaaagcctcccaagagggacagcctcatctagacacggaatccaaaagaagctcaaaagggtggatcaggttcctcaaaagaaagatgactcaacttgtaactccacggtagagacaagggcccaaaaggcgagaactgaatgtgcccgaaagtcgagatcagaggagatcattgatggcacttcagaaatgaatgaaggaaagaggtcccagaagacgcctagtacaccacgaagggtcacacaaggggcagcctcacctgggcatggcatccaagagaagctccaagtggtggataaggtgactcaaaggaaagacgactcaacctggaactcagaggtcatgatgagggtccaaaaggcaagaactaaatgtgcccgaaagtccagatcgaaagaaaagaaaaaggagaaagatatctgttcaagctcaaaaaggagatttcagaaaaatattcaccgaagaggaaaacccaaaagtgacactgtggattttcactgttctaagctccccgtgacctgtggtgaggcgaaagggattttatataagaagaaaatgaaacacggatcctcagtgaagtgcattcggaatgaggatggaacttggttaacaccaaatgaatttgaagtcgaaggaaaaggaaggaacgcaaagaactggaaacggaatatacgttgtgaaggaatgaccctaggagagctgctgaagcggaaaaactcggatgaatgcgaggtgtgctgtcaagggggacaacttctctgctgcggtacttgtccacgagtcttccatgaggactgtcacatcccccctgtggaagccaagaggatgctgtggagttgcaccttctgcaggatgaagaggtcttcaggaagccaacagtgccatcatgtatctaagaccctggagaggcagatgcagcctcaggaccagctgattcgagattacggtgagccctttcaggaagcaatgtggttggacctggttaaggaaaggctgattacggaaatgtacacggtggcatggtttgtgcgagacatgcgcctgatgtttcgcaaccataaaacattttacaaggcttctgactttggccaggtaggacttgacttagaggcagaatttgaaaaagatctcaaagacgtgctcggttttcatgaagccaatgacggcggtttctggactcttccttgaccctgttctgtaaagactgaagcatccccacctcaggattcagctgatgggaccctggcttggactgttgattgccagtgagtctgggatgtaattggctgccctcaggacccaaacccagacacttcataggattatcacaccctccatctttattctttctttttacctttaaaagtctatatcta

SEQ ID NO: 222 - protein, 689 aa, Homo sapiens
MFTMTRAMEEALFQHFMHQKLGIAYAIHKPFPFFEGLLDNSIITKRMYMESLEACRNLIPVSRVVHNILTQLERTFNLSLLVTLFSQINLREYPNLVTIYRSFKRVGASYERQSRDTPILLEAPTGLAEGSSLHTPLALPPPQPPQPSCSPCAPRVSEPGTSSQQSDEILSESPSPSDPVLPLPALIQEGRSTSVTNDKLTSKMNAEEDSEEMPSLLTSTVQVASDNLIPQIRDKEDPQEMPHSPLGSMPEIRDNSPEPNDPEEPQEVSSTPSDKKGKKRKRCIWSTPKRRHKKKSLPRGTASSRHGIQKKLKRVDQVPQKKDDSTCNSTVETRAQKARTECARKSRSEEIIDGTSEMNEGKRSQKTPSTPRRVTQGAASPGHGIQEKLQVVDKVTQRKDDSTWNSEVMMRVQKARTKCARKSRSKEKKKEKDICSSSKRRFQKNIHRRGKPKSDTVDFHCSKLPVTCGEAKGILYKKKMKHGSSVKCIRNEDGTWLTPNEFEVEGKGRNAKNWKRNIRCEGMTLGELLKRKNSDECEVCCQGGQLLCCGTCPRVFHEDCHIPPVEAKRMLWSCTFCRMKRSSGSQQCHHVSKTLERQMQPQDQLIRDYGEPFQEAMWLDLVKERLITEMYTVAWFVRDMRLMFRNHKTFYKASDFGQVGLDLEAEFEKDLKDVLGFHEANDGGFWTLP

SEQ ID NO: 223 - DNA, 2787 bp, Homo sapiens
agagcggaggccgcactccagcactgcgcagggaccgccttggaccgcagttgccggccaggaatcccagtgtcacggtggacacgcctccctcgcgcccttgccgcccacctgctcacccagctcaggggctttggaattctgtggccacactgcgaggagatcggttctgggtcggaggctacaggaagactcccactccctgaaatctggagtgaagaacgccgccatccagccaccattccaaggaggtgcaggagaacagctctgtgataccatttaacttgttgacattacttttatttgaaggaacgtatattagagcttactttgcaaagaaggaagatggttgtttccgaagtggacatcgcaaaagctgatccagctgctgcatcccaccctctattactgaatggagatgctactgtggcccagaaaaatccaggctcggtggctgagaacaacctgtgcagccagtatgaggagaaggtgcgcccctgcatcgacctcattgactccctgcgggctctaggtgtggagcaggacctggccctgccagccatcgccgtcatcggggaccagagctcgggcaagagctccgtgttggaggcactgtcaggagttgcccttcccagaggcagcgggatcgtgaccagatgcccgctggtgctgaaactgaagaaacttgtgaacgaagataagtggagaggcaaggtcagttaccaggactacgagattgagatttcggatgcttcagaggtagaaaaggaaattaataaagcccagaatgccatcgccggggaaggaatgggaatcagtcatgagctaatcaccctggagatcagctcccgagatgtcccggatctgactctaatagaccttcctggcataaccagagtggctgtgggcaatcagcctgctgacattgggtataagatcaagacactcatcaagaagtacatccagaggcaggagacaatcagcctggtggtggtccccagtaatgtggacatcgccaccacagaggctctcagcatggcccaggaggtggaccccgagggagacaggaccatcggaatcttgacgaagcctgatctggtggacaaaggaactgaagacaaggttgtggacgtggtgcggaacctcgtgttccacctgaagaagggttacatgattgtcaagtgccggggccagcaggagatccaggaccagctgagcctgtccgaagccctgcagagagagaagatcttctttgagaaccacccatatttcagggatctgctggaggaaggaaaggccacggttccctgcctggcagaaaaacttaccagcgagctcatcacacatatctgtaaatctctgcccctgttagaaaatcaaatcaaggagactcaccagagaataacagaggagctacaaaagtatggtgtcgacataccggaagacgaaaatgaaaaaatgttcttcctgatagataaaattaatgcctttaatcaggacatcactgctctcatgcaaggagaggaaactgtaggggaggaagacattcggctgtttaccagactccgacacgagttccacaaatggagtacaataattgaaaacaattttcaagaaggccataaaattttgagtagaaaaatccagaaatttgaaaatcagtatcgtggtagagagctgccaggctttgtgaattacaggacatttgagacaatcgtgaaacagcaaatcaaggcactggaagagccggctgtggatatgctacacaccgtgacggatatggtccggcttgctttcacagatgtttcgataaaaaattttgaagagttttttaacctccacagaaccgccaagtccaaaattgaagacattagagcagaacaagagagagaaggtgagaagctgatccgcctccacttccagatggaacagattgtctactgccaggaccaggtatacaggggtgcattgcagaaggtcagagagaaggagctggaagaagaaaagaagaagaaatcctgggattttggggctttccagtccagctcggcaacagactcttccatggaggagatctttcagcacctgatggcctatcaccaggaggccagcaagcgcatctccagccacatccctttgatcatccagttcttcatgctccagacgtacggccagcagcttcagaaggccatgctgcagctcctgcaggacaaggacacctacagctggctcctgaaggagcggagcgacaccagcgacaagcggaagttcctgaaggagcggcttgcacggctgacgcaggctcggcgccggcttgcccagttccccggttaaccacactctgtccagccccgtagacgtgcacgcacactgtctgcccccgttcccgggtagccactggactgacgacttgagtgctcagtagtcagactggatagtccgtctctgcttatccgttagccgtggtgatttagcaggaagctgtgagagcagtttggtttctagcatgaagacagagccccaccctcagatgcacatgagctggcgggattgaaggatgctgtcttcgtactgggaaagggattttcagccctcagaatcgctccaccttgcagctctccccttctctgtattcctagaaactgacacatgctgaacatcacagcttatttcctcatttttataatgtcccttcacaaacccagtgttttaggagcatgagtgccgtgtgtgtgcgtcctgtcggagccctgtctcctctctctgtaataaactcatttctagcag

SEQ ID NO: 224 - protein, 662 aa, Homo sapiens
MVVSEVDIAKADPAAASHPLLLNGDATVAQKNPGSVAENNLCSQYEEKVRPCIDLIDSLRALGVEQDLALPAIAVIGDQSSGKSSVLEALSGVALPRGSGIVTRCPLVLKLKKLVNEDKWRGKVSYQDYEIEISDASEVEKEINKAQNAIAGEGMGISHELITLEISSRDVPDLTLIDLPGITRVAVGNQPADIGYKIKTLIKKYIQRQETISLVVVPSNVDIATTEALSMAQEVDPEGDRTIGILTKPDLVDKGTEDKVVDVVRNLVFHLKKGYMIVKCRGQQEIQDQLSLSEALQREKIFFENHPYFRDLLEEGKATVPCLAEKLTSELITHICKSLPLLENQIKETHQRITEELQKYGVDIPEDENEKMFFLIDKINAFNQDITALMQGEETVGEEDIRLFTRLRHEFHKWSTIIENNFQEGHKILSRKIQKFENQYRGRELPGFVNYRTFETIVKQQIKALEEPAVDMLHTVTDMVRLAFTDVSIKNFEEFFNLHRTAKSKIEDIRAEQEREGEKLIRLHFQMEQIVYCQDQVYRGALQKVREKELEEEKKKKSWDFGAFQSSSATDSSMEEIFQHLMAYHQEASKRISSHIPLIIQFFMLQTYGQQLQKAMLQLLQDKDTYSWLLKERSDTSDKRKFLKERLARLTQARRRLAQFPG

SEQ ID NO: 225 - DNA, 2709 bp, Homo sapiens
gggaatagcagaataggagcaagccagcactagtcagctaactaagtgactcaaccaaggccttttttccttgttatctttgcagatacttcattttcttagcgtttctggagattacaacatcctgcggttccgtttctgggaactttactgatttatctcccccctcacacaaataagcattgattcctgcatttctgaagatctcaagatctggactactgttgaaaaaatttccagtgaggctcacttatgtctgtaaagatgggaaaaaaatacaagaacattgttctactaaaaggattagaggtcatcaatgattatcattttagaatggttaagtccttactgagcaacgatttaaaacttaatttaaaaatgagagaagagtatgacaaaattcagattgctgacttgatggaagaaaagttccgaggtgatgctggtttgggcaaactaataaaaattttcgaagatataccaacgcttgaagacctggctgaaactcttaaaaaagaaaagttaaaagtaaaaggaccagccctatcaagaaagaggaagaaggaagtgcatgctacttcacctgcaccctccacaagcagcactgtcaaaactgaaggagcagaggcaactcctggagctcagaaaagaaaaaaatcaaccaaagaaaaggctggacccaaagggagtaaggtgtccgaggaacagactcagcctccctctcctgcaggagccggcatgtccacagccatgggccgttccccatctcccaagacctcattgtcagctccacccaacagttcttcaactgagaacccgaaaacagtggccaaatgtcaggtaactcccagaagaaatgttctccaaaaacgcccagtgatagtgaaggtactgagtacaacaaagccatttgaatatgagaccccagaaatggagaaaaaaataatgtttcatgctacagtggctacacagacacagttcttccatgtgaaggttttaaacaccagcttgaaggagaaattcaatggaaagaaaatcatcatcatatcagattatttggaatatgatagtctcctagaggtcaatgaagaatctactgtatctgaagctggtcctaaccaaacgtttgaggttccaaataaaatcatcaacagagcaaaggaaactctgaagattgatattcttcacaaacaagcttcaggaaatattgtatatggggtatttatgctacataagaaaacagtaaatcagaagaccacaatctacgaaattcaggatgatagaggaaaaatggatgtagtggggacaggacaatgtcacaatatcccctgtgaagaaggagataagctccagcttttctgctttcgacttagaaaaaagaaccagatgtcaaaactgatttcagaaatgcatagttttatccagataaagaaaaaaacaaacccgagaaacaatgaccccaagagcatgaagctaccccaggaacagcgtcagcttccatatccttcagaggccagcacaaccttccctgagagccatcttcggactcctcagatgccaccaacaactccatccagcagtttcttcaccaagaaaagtgaagacacaatctccaaaatgaatgacttcatgaggatgcagatactgaaggaagggagtcattttccaggaccgttcatgaccagcataggcccagctgagagccatccccacactcctcagatgcctccatcaacaccaagcagcagtttcttaaccacgttgaaaccaagactgaagactgaacctgaagaagtttccatagaagacagtgcccagagtgacctcaaagaagtgatggtgctgaacgcaacagaatcatttgtatatgagcccaaagagcagaagaaaatgtttcatgccacagtggcaactgagaatgaagtcttccgagtgaaggtttttaatattgacctaaaggagaagttcaccccaaagaagatcattgccatagcaaattatgtttgccgcaatgggttcctggaggtatatcctttcacacttgtggctgatgtgaatgctgaccgaaacatggagatcccaaaaggattgattagaagtgccagcgtaactcctaaaatcaatcagctttgctcacaaactaaaggaagttttgtgaatggggtgtttgaggtacataagaaaaatgtaaggggtgaattcacttattatgaaatacaagataatacagggaagatggaagtggtggtgcatggacgactgaacacaatcaactgtgaggaaggagataaactgaaactcaccagctttgaattggcaccgaaaagtgggaataccggggagttgagatctgtaattcatagtcacatcaaggtcatcaagaccaggaaaaacaagaaagacatactcaatcctgattcaagtatggaaacttcaccagactttttcttctaaaatctggatgtcattgacgataatgtttatggagataaggtctaagtccctaaaaaaatgtacatatacctggttgaaatacaacactatacatacacaccaccatatatactagctgttaatcctatggaatgggggtattgggagtgcttttttaatttttcatagtttttttttaataaaatggcatattttgcatctacaacttctataataagaaaaaataaataaacattatcttttttgtgaaaaaaa

SEQ ID NO: 226 - protein, 729 aa, Homo sapiens
MGKKYKNIVLLKGLEVINDYHFRMVKSLLSNDLKLNLKMREEYDKIQIADLMEEKFRGDAGLGKLIKIFEDIPTLEDLAETLKKEKLKVKGPALSRKRKKEVHATSPAPSTSSTVKTEGAEATPGAQKRKKSTKEKAGPKGSKVSEEQTQPPSPAGAGMSTAMGRSPSPKTSLSAPPNSSSTENPKTVAKCQVTPRRNVLQKRPVIVKVLSTTKPFEYETPEMEKKIMFHATVATQTQFFHVKVLNTSLKEKFNGKKIIIISDYLEYDSLLEVNEESTVSEAGPNQTFEVPNKIINRAKETLKIDILHKQASGNIVYGVFMLHKKTVNQKTTIYEIQDDRGKMDVVGTGQCHNIPCEEGDKLQLFCFRLRKKNQMSKLISEMHSFIQIKKKTNPRNNDPKSMKLPQEQRQLPYPSEASTTFPESHLRTPQMPPTTPSSSFFTKKSEDTISKMNDFMRMQILKEGSHFPGPFMTSIGPAESHPHTPQMPPSTPSSSFLTTLKPRLKTEPEEVSIEDSAQSDLKEVMVLNATESFVYEPKEQKKMFHATVATENEVFRVKVFNIDLKEKFTPKKIIAIANYVCRNGFLEVYPFTLVADVNADRNMEIPKGLIRSASVTPKINQLCSQTKGSFVNGVFEVHKKNVRGEFTYYEIQDNTGKMEVVVHGRLNTINCEEGDKLKLTSFELAPKSGNTGELRSVIHSHIKVIKTRKNKKDILNPDSSMETSPDFFF

SEQ ID NO: 227 - DNA, 4151 bp, Homo sapiens
gggaatagcagaataggagcaagccagcactagtcagctaactaagtgactcaaccaaggccttttttccttgttatctttgcagatacttcattttcttagcgtttctggagattacaacatcctgcggttccgtttctgggaactttactgatttatctcccccctcacacaaataagcattgattcctgcatttctgaagatctcaagatctggactactgttgaaaaaatttccagtgaggctcacttatgtctgtaaagatgggaaaaaaatacaagaacattgttctactaaaaggattagaggtcatcaatgattatcattttagaatggttaagtccttactgagcaacgatttaaaacttaatttaaaaatgagagaagagtatgacaaaattcagattgctgacttgatggaagaaaagttccgaggtgatgctggtttgggcaaactaataaaaattttcgaagatataccaacgcttgaagacctggctgaaactcttaaaaaagaaaagttaaaagtaaaaggaccagccctatcaagaaagaggaagaaggaagtgcatgctacttcacctgcaccctccacaagcagcactgtcaaaactgaaggagcagaggcaactcctggagctcagaaaagaaaaaaatcaaccaaagaaaaggctggacccaaagggagtaaggtgtccgaggaacagactcagcctccctctcctgcaggagccggcatgtccacagccatgggccgttccccatctcccaagacctcattgtcagctccacccaacagttcttcaactgagaacccgaaaacagtggccaaatgtcaggtaactcccagaagaaatgttctccaaaaacgcccagtgatagtgaaggtactgagtacaacaaagccatttgaatatgagaccccagaaatggagaaaaaaataatgtttcatgctacagtggctacacagacacagttcttccatgtgaaggttttaaacaccagcttgaaggagaaattcaatggaaagaaaatcatcatcatatcagattatttggaatatgatagtctcctagaggtcaatgaagaatctactgtatctgaagctggtcctaaccaaacgtttgaggttccaaataaaatcatcaacagagcaaaggaaactctgaagattgatattcttcacaaacaagcttcaggaaatattgtatatggggtatttatgctacataagaaaacagtaaatcagaagaccacaatctacgaaattcaggatgatagaggaaaaatggatgtagtggggacaggacaatgtcacaatatcccctgtgaagaaggagataagctccagcttttctgctttcgacttagaaaaaagaaccagatgtcaaaactgatttcagaaatgcatagttttatccagataaagaaaaaaacaaacccgagaaacaatgaccccaagagcatgaagctaccccaggaacagcgtcagcttccatatccttcagaggccagcacaaccttccctgagagccatcttcggactcctcagatgccaccaacaactccatccagcagtttcttcaccaagaaaagtgaagacacaatctccaaaatgaatgacttcatgaggatgcagatactgaaggaagggagtcattttccaggaccgttcatgaccagcataggcccagctgagagccatccccacactcctcagatgcctccatcaacaccaagcagcagtttcttaaccacgttgaaaccaagactgaagactgaacctgaagaagtttccatagaagacagtgcccagagtgacctcaaagaagtgatggtgctgaacgcaacagaatcatttgtatatgagcccaaagagcagaagaaaatgtttcatgccacagtggcaactgagaatgaagtcttccgagtgaaggtttttaatattgacctaaaggagaagttcaccccaaagaagatcattgccatagcaaattatgtttgccgcaatgggttcctggaggtatatcctttcacacttgtggctgatgtgaatgctgaccgaaacatggagatcccaaaaggattgattagaagtgccagcgtaactcctaaaatcaatcagctttgctcacaaactaaaggaagttttgtgaatggggtgtttgaggtacataaggtaagcccacaccattgttttataaaatttctcctgcaacctccaatttttaaagtcttaacttgtcaactggagtttggtcaacttactcaacacagaaaatcaaccccttcacccttcccccagcactagagataattgaatagagttcatttcaggatatggggtacgttatattgtaacattcctcttcttaaggtatcatcatgcaagttatttagacagtcactaggaaacttggcattttattagttttgatgatctattcagagccacccttgtccaggacagtgcagagtttatatcaacacacatatccttaggattttgtttctttgagttcttctccatctgtatcaatgacaacttaatttaattgtgaataaaagagttgctctcccaagcctgaatcctgattgtgacaaccagagtaagaaataaaatagactactctgctttagaatgcagctatgtctaacagttagctagaattctgatcatttggactccaaagtttcttgcctcttctcattcattaattcatcaggagactgtagagcaactaacttctgcattaaataataagagaaatacgaagcaaaaagactaaaaaagtcacgtagcttaactgctcaatttataaatggggcaataaaatgcaaaaaaaaagaaaaaaagcttggtgaattcttaggcttacagtgtgcctttcagtctctacacatcatgtaaatattatgcttagctgatttaacttcttgtttgaagtactgtttcatactccattatacatgtcttctagggtggcttacttttaattgtgctgttttctctacactcagtttaaatgactgtacatatatatgtggttggagagttaatgaataatgagctacaaaccagaacaatgtgactagatagataggatgatctagaattgagaactggcagattgggaaaagagtggctatatggagaaagaaagaaagtagttccatattgaaataacagtctacttaatgaggaccgttgcaacattctttctcaaacttacaaagtgccataaaaagcctctattctctgctcttgggcaggtgtgaaagaaacctaccaaattaatcagatttttctgtatccaggctccttaaaaaatcccagctgtgctgatgtggaaacaggaagaattaggaaagtaatcaattttttttcctagaaaaaatccagcagacaaagaacttcaacaaaagaggctcaagggaggagttgaaaggcaggattcaaagaccaagtatcttaagctatttggtacctgttattcaggacctacagctctgtttactctatcaaagaccaaaagtttccagaaacaccctgtatttctcatagatttgaaaattattgatccagtttcagaagataagtgttaattttcttttgcagaaaaatgtaaggggtgaattcacttattatgaaatacaagataatacagggaagatggaagtggtggtgcatggacgactgaccacaatcaactgtgaggaaggagataaactgaaactcacctgctttgaattggcaccgaaaagtgggaataccggggagttgagatctgtaattcatagtcacatcaaggtcatcaagaccaggaaaaacaagaaagacatactcaatcctgattccaagtatggaaacttcaccagactttttcttctaaaatctggatgtcattgacgataatgtttatggagataaggtctaagtgcctaaaaaaatgtacatatacctggttgaaatacaacactatacatacacaccaccatatatactagctgttaatcctatggaatggggtattgggagtgcttttttaatttttcatagtttttttttaataaaatggcatattttgcatctacaacttctataatttgaaaaaataaataaacattatcttttttgtgaaaaaaaaa

SEQ ID NO: 228 - protein, 682 aa, Homo sapiens
MGKKYKNIVLLKGLEVINDYHFRMVKSLLSNDLKLNLKMREEYDKIQIADLMEEKFRGDAGLGKLIKIFEDIPTLEDLAETLKKEKLKVKGPALSRKRKKEVHATSPAPSTSSTVKTEGAEATPGAQKRKKSTKEKAGPKGSKVSEEQTQPPSPAGAGMSTAMGRSPSPKTSLSAPPNSSSTENPKTVAKCQVTPRRNVLQKRPVIVKVLSTTKPFEYETPEMEKKIMFHATVATQTQFFHVKVLNTSLKEKFNGKKIIIISDYLEYDSLLEVNEESTVSEAGPNQTFEVPNKIINRAKETLKIDILHKQASGNIVYGVFMLHKKTVNQKTTIYEIQDDRGKMDVVGTGQCHNIPCEEGDKLQLFCFRLRKKNQMSKLISEMHSFIQIKKKTNPRNNDPKSMKLPQEQRQLPYPSEASTTFPESHLRTPQMPPTTPSSSFFTKKSEDTISKMNDFMRMQILKEGSHFPGPFMTSIGPAESHPHTPQMPPSTPSSSFLTTLKPRLKTEPEEVSIEDSAQSDLKEVMVLNATESFVYEPKEQKKMFHATVATENEVFRVKVFNIDLKEKFTPKKIIAIANYVCRNGFLEVYPFTLVADVNADRNMEIPKGLIRSASVTPKINQLCSQTKGSFVNGVFEVHKVSPHHCFIKFLLQPPIFKVLTCQLEFGQLTQHRKSTPSPFPQH

SEQ ID NO: 229 - DNA, 647 bp, Homo sapiens
gctcactgagcaccgtcccagcatccggacaccacagcggcccttcgctccacgcagaaaaccacacttctcataccttcactcaacacttccttccccaaagccagaagatgcacaaggaggaacatgaggtggctgtgctgggggcaccccccagcaccatccttccaaggtccaccgtgattaacatccacagcgagacctccgtgcccgaccatgtcgtctggtccctgttcaacaccctcttcttgaactggtgctgtctgggcttcatagcattcgcctactccgtaaagtctagggacaggaagatggttggcgacgtgaccggggcccaggcctatgcctccaccgccaagtgcctgaacatctgggccctgattctgggcatcctcatgaccattggattcatcctgttactggtattcggctctgtaacagtctaccatattatgttacagataatacaggaaaaacggggttactagtagccgcccatagcctgcaacctttgcactccactgtgcaatgctggccctgcacgctggggctgttgcccctgcccccttggtcctgcccctagatacagcagtttatacccacacacctgtctacagtgtcattcaataaagtgcacgtgcttgtga

SEQ ID NO: 230 - protein, 125 aa, Homo sapiens
MHKEEHEVAVLGAPPSTILPRSTVINIHSETSVPDHVVWSLFNTLFLNWCCLGFIAFAYSVKSRDRKMVGDVTGAQAYASTAKCLNIWALILGILMTIGFILLLVFGSVTVYHIMLQIIQEKRGY

SEQ ID NO: 231 - DNA, 634 bp, Homo sapiens
cggctgagaggcagcgaactcatctttgccagtacaggagcttgtgccgtggcccacagcccacagcccacagccatgggctgggacctgacggtgaagatgctggcgggcaacgaattccaggtgtccctgagcagctccatgtcggtgtcagagctgaaggcgcagatcacccagaagattggcgtgcacgccttccagcagcgtctggctgtccacccgagcggtgtggcgctgcaggacagggtcccccttgccagccagggcctgggccctggcagcacggtcctgctggtggtggacaaatgcgacgaacctctgagcatcctggtgaggaataacaagggccgcagcagcacctacgaggtccggctgacgcagaccgtggcccacctgaagcagcaagtgagcgggctggagggtgtgcaggacgacctgttctggctgaccttcgaggggaagcccctggaggaccagctcccgctgggggagtacggcctcaagcccctgagcaccgtgttcatgaatctgcgcctgcggggaggcggcacagagcctggcgggcggagctaagggcctccaccagcatccgagcaggatcaagggccggaaataaaggctgttgtaagagaat

SEQ ID NO: 232 - protein, 165 aa, Homo sapiens
MGWDLTVKMLAGNEFQVSLSSSMSVSELKAQITQKIGVHAFQQRLAVHPSGVALQDRVPLASQGLGPGSTVLLVVDKCDEPLSILVRNNKGRSSTYEVRLTQTVAHLKQQVSGLEGVQDDLFWLTFEGKPLEDQLPLGEYGLKPLSTVFMNLRLRGGGTEPGGRS

SEQ ID NO: 233 - DNA, 3065 bp, Homo sapiens
tagttattaaagttcctatgcagctccgcctccgtccggcctcatttcctcaaaaaatccctgctttccccgctcgccacgccctcctgctacccggctttaaagctagtgaggcacagcctgcggggaacgtagctagctgcaagcagaggccggcatgaccaccgagcagcgacgcagcctgcaagccttccaggattatatccggaagaccctggaccctacctacatcctgagctacatggccccctggtttagggaggaagaggtgcagtatattcaggctgagaaaaacaacaagggcccaatggaggctgccacactttttctcaagttcctgttggagctccaggaggaaggctggttccgtggctttttggatgccctagaccatgcaggttattctggactttatgaagccattgaaagttgggatttcaaaaaaattgaaaagttggaggagtatagattacttttaaaacgtttacaaccagaatttaaaaccagaattatcccaaccgatatcatttctgatctgtctgaatgtttaattaatcaggaatgtgaagaaattctacagatttgctctactaaggggatgatggcaggtgcagagaaattggtggaatgccttctcagatcagacaaggaaaactggcccaaaactttgaaacttgctttggagaaagaaaggaacaagttcagtgaactgtggattgtagagaaaggtataaaagatgttgaaacagaagatcttgaggataagatggaaacttctgacatacagattttctaccaagaagatccagaatgccagaatcttagtgagaattcatgtccaccttcagaagtgtctgatacaaacttgtacagcccatttaaaccaagaaattaccaattagagcttgctttgcctgctatgaaaggaaaaaacacaataatatgtgctcctacaggttgtggaaaaacctttgtttcactgcttatatgtgaacatcatcttaaaaaattcccacaaggacaaaaggggaaagttgtcttttttgcgaatcagatcccagtgtatgaacagcagaaatctgtattctcaaaatactttgaaagacatgggtatagagttacaggcatttctggagcaacagctgagaatgtcccagtggaacagattgttgagaacaatgacatcatcattttaactccacagattcttgtgaacaaccttaaaaagggaacgattccatcactatccatctttactttgatgatatttgatgaatgccacaacactagtaaacaacacccgtacaatatgatcatgtttaattatctagatcagaaacttggaggatcttcaggcccactgccccaggtcattgggctgactgcctcggttggtgttggggatgccaaaaacacagatgaagccttggattatatctgcaagctgtgtgcttctcttgatgcgtcagtgatagcaacagtcaaacacaatctggaggaactggagcaagttgtttataagccccagaagtttttcaggaaagtggaatcacggattagcgacaaatttaaatacatcatagctcagctgatgagggacacagagagtctggcaaagagaatctgcaaagacctcgaaaacttatctcaaattcaaaatagggaatttggaacacagaaatatgaacaatggattgttacagttcagaaagcatgcatggtgttccagatgccagacaaagatgaagagagcaggatttgtaaagccctgtttttatacacttcacatttgcggaaatataatgatgccctcattatcagtgagcatgcacgaatgaaagatgctctggattacttgaaagacttcttcagcaatgtccgagcagcaggattcgaagagattgagcaagatcttactcagagatttgaagaaaagctgcaggaactagaaagtgtttccagggatcccagcaatgagaatcctaaacttgaagacctctgcttcatcttacaagaagagtaccacttaaacccagagacaataacaattctctttgtgaaaaccagagcacttgtggacgctttaaaaaattggattgaaggaaatcctaaactcagttttctaaaacctggcatattgactggacgtggcaaaacaaatcagaacacaggaatgaccctcccggcacagaagtgtatattggatgcattcaaagccagtggagatcacaatattctgattgccacctcagttgctgatgaaggcattgacattgcacagtgcaatcttgtcatcctttatgagtatgtgggcaatgtcatcaaaatgatccaaaccagaggcagaggaagagcaagaggtagcaagtgcttccttctgactagtaatgctggtgtaattgaaaaagaacaaataaacatgtacaaagaaaaaatgatgaatgactctattttacgccttcagacatgggacgaagcagtatttagggaaaagattctgcatatacagactcatgaaaaattcatcagagatagtcaagaaaaaccaaaacctgtccctgataaggaaaataaaaaactgctctgcagaaagtgcaaagccttggcatgttacacagctgacgtaagagtgatagaggaatgccattacactgtgcttggagatgcttttaaggaatgctttgtgagtagaccacatcccaagccaaagcagttttcaagttttgaaaaaagagcaaagatattctgtgcccgacagaactgcagccatgactggggaatccatgtgaagtacaagacatttgagattccagttataaaaattgaaagttttgtggtggaggatattgcaactggagttcagacactgtactcgaagtggaaggactttcattttgagaagataccatttgatccagcagaaatgtccaaatgatatcaggtcctcaatcttcagctacagggaatgagtaactttgagtggagaagaaacaaacatagtgggtataatcatggatcgcttgtacccctgtgaaaatatattttttaaaaataaaaaaaaaaaa

SEQ ID NO: 234 - protein, 925 aa, Homo sapiens [sequence omitted]

SEQ ID NO: 235 - DNA, 1190 bp, Homo sapiens
ggcacgaggctgaggtgtatttcgggtcttgctggggctgagagagaccacagccctttggggggtacaaacaagagttcagttgctgtgaattctgccactgtgcccagctctgaagcctcagctcttgccaaacagacccgagacccatgtcagccccactggatgccgccctccacgcccttcaggaggagcaggccagactcaagatgaggctgtgggacctgcagcagctgagaaaggagctcggggactcccccaaagacaaggtcccattttcagtgcccaagatccccctggtattccgaggacacacccagcaggacccggaagtgcctaagtctttagtttccaatttgcggatccactgccctctgcttgcgggctctgctctgatcacctttgatgaccccaaagtggctgagcaggtgctgcaacaaaaggagcacacgatcaacatggaggagtgccggctgcgggtgcaggtccagcccttggagctgcccatggtcaccaccatccaggtgatggtgtccagccagttgagtggccggagggtgttggtcactggatttcctgccagcctcaggctgagtgaggaggagctgctggacaagctagagatcttctttggcaagactaggaacggaggtggcgatgtggacgttcgggagctactgccagggagtgtcatgctggggtttgctagggatggagtggctcagcgtctgtgccaaatcggccagttcacagtgccactgggtgggcagcaagtccctctgagagtctctccgtatgtgaatggggagatccagaaggctgagatcaggtcgcagccagttccccgctcggtactggtgctcaacattcctgatatcttggatggcccggagctgcatgacgtcctggagatccacttccagaagcccacccgcgggggcggggaggtagaggccctgacagtcgtaccccaaggacagcagggcctagcagtcttcacctctgagtcaggctaggggcctccccttctcatcctccccacccccccgccaaggttctcacactggcctgggcttgggtgcccatataggaggtctgtatgttcaccaacagtgcggaggggtcacacattgcaaaacactgcccagaacagtaaaaagagcctgcatgccaaaaaaaaaaaaaaaaaa

SEQ ID NO: 236 - protein, 288 aa, Homo sapiens
MSAPLDAALHALQEEQARLKMRLWDLQQLRKELGDSPKDKVPFSVPKIPLVFRGHTQQDPEVPKSLVSNLRIHCPLLAGSALITFDDPKVAEQVLQQKEHTINMEECRLRVQVQPLELPMVTTIQVMVSSQLSGRRVLVTGFPASLRLSEEELLDKLEIFFGKTRNGGGDVDVRELLPGSVMLGFARDGVAQRLCQIGQFTVPLGGQQVPLRVSPYVNGEIQKAEIRSQPVPRSVLVLNIPDILDGPELHDVLEIHFQKPTRGGGEVEALTVVPQGQQGLAVFTSESG

SEQ ID NO: 237 - DNA, 2905 bp, Homo sapiens
cggcagccagctgagagcaatgggaaatggggagtcccagctgtcctcggtgcctgctcagaagctgggttggtttatccaggaatacctgaagccctacgaagaatgtcagacactgatcgacgagatggtgaacaccatctgtgacgtctgcaggaaccccgaacagttccccctggtgcagggagtggccataggtggctcctatggacggaaaacagtcttaagaggcaactccgatggtacccttgtccttttcttcagtgacttaaaacaattccaggatcagaagagaagccaacgtgacatcctcgataaaactggggataagctgaagttctgtctgttcacgaagtggttgaaaaacaatttcgagatccagaagtcccttgatgggtccaccatccaggtgttcacaaaaaatcagagaatctctttcgaggtgctggccgccttcaacgctctgagcttaaatgataatcccagcccctggatctatcgagagctcaaaagatccttggataagacaaatgccagtcctggtgagtttgcagtctgcttcactgaactccagcagaagttttttgacaaccgtcctggaaaactaaaggatttgatcctcttgataaagcactggcatcaacagtgccagaaaaaaatcaaggatttaccctcgctgtctccgtatgccctggagctgcttacggtgtatgcctgggaacaggggtgcagaaaagacaactttgacattgctgaaggcgtcagaacggttctggagctgatcaaatgccaggagaagctgtgtatctattggatggtcaactacaactttgaagatgagaccatcaggaacatcctgctgcaccagctccaatcagcgaggccagtaatcttggatccagttgacccaaccaataatgtgagtggagataaaatatgctggcaatggctgaaaaaagaagctcaaacctggttgacttctcccaacctggataatgagttacctgcaccatcttggaatgtcctgcctgcaccactcttcacgaccccaggccaccttctggataagttcatcaaggagtttctccagcccaacaaatgcttcctagagcagattgacagtgctgttaacatcatccgtacattccttaaagaaaactgcttccgacaatcaacagccaagatccagattgtccggggaggatcaaccgccaaaggcacagctctgaagactggctctgatgccgatctcgtcgtgttccataactcacttaaaagctacacctcccaaaaaaacgagcggcacaaaatcgtcaaggaaatccatgaacagctgaaagccttttggagggagaaggaggaggagcttgaagtcagctttgagcctcccaagtggaaggctcccagggtgctgagcttctctctgaaatccaaagtcctcaacgaaagtgtcagctttgatgtgcttcctgcctttaatgcactgggtcagctgagttctggctccacacccagccccgaggtttatgcagggctcattgatctgtataaatcctcggacctcccgggaggagagttttctacctgtttcacagtcctgcagcgaaacttcattcgctcccggcccaccaaactaaaggatttaattcgcctggtgaagcactggtacaaagagtgtgaaaggaaactgaagccaaaggggtctttgcccccaaagtatgccttggagctgctcaccatctatgcctgggagcaggggagtggagtgccggattttgacactgcagaaggtttccggacagtcctggagctggtcacacaatatcagcagctcggcatcttctggaaggtcaattacaactttgaagatgagaccgtgaggaagtttctactgagccagttgcagaaaaccaggcctgtgatcttggacccaggcgaacccacaggtgacgtgggtggaggggaccgttggtgttggcatcttctggacaaagaagcaaaggttaggttatcctctccctgcttcaaggatgggactggaaacccaataccaccttggaaagtgccgacaatgcagacaccaggaagttgtggagctaggatccatcctattgtcaatgagatgttctcatccagaagccatagaatcctgaataataattctaaaagaaacttctggagatcatctggcaatcgcttttaaagactcggctcaccgtgagaaagagtcactcacatccattcttcccttgatggtccctattcctccttcccttgccttcttggacttcttgaaatcaatcaagactgcaaaccctttcataaagctgccttgctgaactcctctctgcaggagccctgcttaaaatagttgatgtcatcactttatgtgcatcttatttctgtcaacttgtatttttttttcttgtatttttccaattagctcctcctttttccttccagtctaaaaaaggaatcctctgtgtcttcaaagcaaagctctttactttccccttggttctcataactctgtgatcttgctctcggtgcttccaactcatccacgtcctgtctgtttcctctgtatacaaaaccctttctgcccctgctgacacagacatcctctatgccagcagccaggccaaccctttcattagaacttcaagctctccaaaggctcagattataactgttgtcatatttatatgaggctgttgtcttttccttctgagcctgcctttatccccccacccaggagtatcctcttgccaaagcaaaagactttttccttggctttagccttaaagatacttgaaggtctaggtgctttaacctcacataccctcacttaaacttttatcactgttgcatataccagttgtgatacaataaagaatgtatctgg

SEQ ID NO: 238 - protein, 727 aa, Homo sapiens
MGNGESQLSSVPAQKLGWFIQEYLKPYEECQTLIDEMVNTICDVCRNPEQFPLVQGVAIGGSYGRKTVLRGNSDGTLVLFFSDLKQFQDQKRSQRDILDKTGDKLKFCLFTKWLKNNFEIQKSLDGSTIQVFTKNQRISFEVLAAFNALSLNDNPSPWIYRELKRSLDKTNASPGEFAVCFTELQQKFFDNRPGKLKDLILLIKHWHQQCQKKIKDLPSLSPYALELLTVYAWEQGCRKDNFDIAEGVRTVLELIKCQEKLCIYWMVNYNFEDETIRNILLHQLQSARPVILDPVDPTNNVSGDKICWQWLKKEAQTWLTSPNLDNELPAPSWNVLPAPLFTTPGHLLDKFIKEFLQPNKCFLEQIDSAVNIIRTFLKENCFRQSTAKIQIVRGGSTAKGTALKTGSDADLVVFHNSLKSYTSQKNERHKIVKEIHEQLKAFWREKEEELEVSFEPPKWKAPRVLSFSLKSKVLNESVSFDVLPAFNALGQLSSGSTPSPEVYAGLIDLYKSSDLPGGEFSTCFTVLQRNFIRSRPTKLKDLIRLVKHWYKECERKLKPKGSLPPKYALELLTIYAWEQGSGVPDFDTAEGFRTVLELVTQYQQLGIFWKVNYNFEDETVRKFLLSQLQKTRPVILDPGEPTGDVGGGDRWCWHLLDKEAKVRLSSPCFKDGTGNPIPPWKVPTMQTPGSCGARIHPIVNEMFSSRSHRILNNNSKRNFWRSSGNRF

SEQ ID NO: 239 - DNA, 6270 bp, Homo sapiens
gccctgcttccccttgcacctgcgccgggcggccatggacttgtacagcaccccggccgctgcgctggacaggttcgtggccagaaggctgcagccgcggaaggagttcgtagagaaggcgcggcgcgctctgggcgccctggccgctgccctgagggagcgcgggggccgcctcggtgctgctgccccgcgggtgctgaaaactgtcaagggaggctcctcgggccggggcacagctctcaagggtggctgtgattctgaacttgtcatcttcctcgactgcttcaagagctatgtggaccagagggcccgccgtgcagagatcctcagtgagatgcgggcatcgctggaatcctggtggcagaacccagtccctggtctgagactcacgtttcctgagcagagcgtgcctggggccctgcagttccgcctgacatccgtagatcttgaggactggatggatgttagcctggtgcctgccttcaatgtcctgggtcaggccggctccgcggtcaaacccaagccacaagtctactctaccctcctcaacagtggctgccaagggggcgagcatgcggcctgcttcacagagctgcggaggaactttgtgaacattcgcccagccaagttgaagaacctaatcttgctggtgaagcactggtaccaccaggtgtgcctacaggggttgtggaaggagacgctgcccccggtctatgccctggaattgctgaccatcttcgcctgggagcagggctgtaagaaggatgctttcagcctaggcgaaggcctccgaactgtcctgggcctgatccaacagcatcagcacctgtgtgttttctggactgtcaactatggcttcgaggaccctgcagttgggcagttcttgcagcggcacgttaagagacccaggcctgtgatcctggacccagctgaccccacatgggacctggggaatggggcagcctggcactgggatttgcatgcccaggaggcagcatcctgctatgaccacccatgctttctgagggggatgggggacccagtgcagtcttggaaggggccgggccttccacgtgctggatgctcaggtttgggccaccccatccagctagaccctaaccagaagacccctgaaaacagcaagagcctcaatgctgtgtacccaagagcagggagcaaacctccctcatgcccagctcctggccccactgcggagccagcatcgtacccctctgtgccgggaatggccttggacctgtctcagatccccaccaaggagctggaccgcttcatccaggaccacctgaagccgagcccccagttccaggagcaggtgaaaaaggccatcgacatcatcttgcgctgcctccatgagaactgtgttcacaaggcctcaagagtcagtaaagggggctcatttggccggggcacagacctaagggatggctgtgatgttgaactcatcatcttcctcaactgcttcacggactacaaggaccaggggccccgccgcgcagagatccttgatgagatgcgagcgcacgtagaatcctggtggcaggaccaggtgcccagcctgagccttcagtttcctgagcagaatgtgcctgaggctctgcagttccagctggtgtccacagccctgaagagctggacggatgttagcctgctgcctgccttcgatgctgtggggcagctcagttctggcaccaaaccaaatccccaggtctactcgaggctcctcaccagtggctgccaggagggcgagcataaggcctgcttcgcagagctgcggaggaacttcatgaacattcgccctgtcaagctgaagaacctgattctgctggtgaagcactggtaccgccaggttgcggctcagaacaaaggaaaaggaccagcccctgcctctctgcccccagcctatgccctggagctcctcaccatctttgcctgggagcagggctgcaggcaggattgtttcaacatggcccaaggcttccggacggtgctggggctcgtgcaacagcatcagcagctctgtgtctactggacggtcaactatagcactgaggacccagccatgagaatgcaccttcttggccagcttcgaaaacccagacccctggtcctggaccccgctgatcccacctggaacgtgggccacggtagctgggagctgttggcccaggaagcagcagcgctggggatgcaggcctgctttctgagtagagacgggacatctgtgcagccctgggatgtgatgccagccctcctttaccaaaccccagctggggaccttgacaagttcatcagtgaatttctccagcccaaccgccagttcctggcccaggtgaacaaggccgttgataccatctgttcatttttgaaggaaaactgcttccggaattctcccatcaaagtgatcaaggtggtcaagggtggctcttcagccaaaggcacagctctgcgaggccgctcagatgccgacctcgtggtgttcctcagctgcttcagccagttcactgagcagggcaacaagcgggccgagatcatctccgagatccgagcccagctggaggcatgtcaacaggagcggcagttcgaggtcaagtttgaagtctccaaatgggagaatccccgcgtgctgagcttctcactgacatcccagacgatgctggaccagagtgtggactttgatgtgctgccagcctttgacgccctaggccagctggtctctggctccaggcccagctctcaagtctacgtcgacctcatccacagctacagcaatgcgggcgagtactccacctgcttcacagagctacaacgggacttcatcatctctcgccctaccaagctgaagagcctgatccggctggtgaagcactggtaccagcagtgtaccaagatctccaaggggagaggctccctacccccacagcacgggctggaactcctgactgtgtatgcctgggagcagggcgggaaggactcccagttcaacatggctgagggcttccgcacggtcctggagctggtcacccagtaccgccagctctgtatctactggaccatcaactacaacgccaaggacaagactgttggagacttcctgaaacagcagcttcagaagcccaggcctatcatcctggatccggctgacccgacaggcaacctgggccacaatgcccgctgggacctgctggccaaggaagctgcagcctgcacatctgccctgtgctgcatgggacggaatggcatccccatccagccatggccagtgaaggctgctgtgtgaagttgagaaaatcagcggtcctactggatgaagagaagatggacaccagccctcagcatgaggaaattcagggtcccctaccagatgagagagattgtgtacatgtgtgtgtgagcacatgtgtgcatgtgtgtgcacacgtgtgcatgtgtgtgttttagtgaatctgctctcccagctcacacactcccctgcctcccatggcttacacactaggatccagactccatggtttgacaccagcctgcgtttgcagcttctctgtcacttccatgactctatcctcataccaccactgctgcttcccacccagctgagaatgccccctcctccctgactcctctctgcccatgcaaattagctcacatctttcctcctgctgcaatccatcccttcctcccattggcctctccttgccaaatctaaatactttatatagggatggcagagagttcccatctcatctgtcagccacagtcatttggtactggctacctggagccttatcttctgaagggttttaaagaatggccaattagctgagaagaattatctaatcaattagtgatgtctgccatggatgcagtagaggaaagtggtggtacaagtgccatgattgattagcaatgtctgcactggatatggaaaaaagaaggtgcttgcaggtttacagtgtatatgtgggctattgaagagccctctgagctcggttgctagcaggagagcatgcccatattggcttactttgtctgccacagacacagacagagggagttgggacatgcatgctatggggaccctcttgttggacacctaattggatgcctcttcatgagaggcctccttttcttcaccttttatgctgcactcctcccctagtttacacatcttgatgctgtggctcagtttgccttcctgaatttttattgggtccctgttttctctcctaacatgctgagattctgcatccccacagcctaaactgagccagtggccaaacaaccgtgctcagcctgtttctctctgccctctagagcaaggcccaccaggtccatccaggaggctctcctgacctcaagtccaacaacagtgtccacactagtcaaggttcagcccagaaaacagaaagcactctaggaatcttaggcagaaagggattttatctaaatcactggaaaggctggaggagcagaaggcagaggccaccactggactattggtttcaatattagaccactgtagccgaatcagaggccagagagcagccactgctactgctaatgccaccactacccctgccatcactgccccacatggacaaaactggagtcgagacctaggttagattcctgcaaccacaaacatccatcagggatggccagctgccagagctgcgggaagacggatcccacctccctttcttagcagaatctaaattacagccagacctctggctgcagaggagtctgagacatgtatgattgaatgggtgccaagtgccagggggcggagtccccagcagatgcatcctggccatctgttgcgtggatgagggagtgggtctatctcagaggaaggaacaggaaacaaagaaaggaagccactgaacatcccttctctgctccacaggagtgtcttagacagcctgactctccacaaaccactgttaaaacttacctgctaggaatgctagattgaatgggatgggaagagccttccctcattattgtcattcttggagagaggtgagcaaccaagggaagctcctctgattcacctagaacctgttctctgccgtctttggctcagcctacagagactagagtaggtgaagggacagaggacagggcttctaatacctgtgccatattgacagcctccatccctgtcccccatcttggtgctgaaccaacgctaagggcaccttcttagactcacctcatcgatactgcctggtaatccaaagctagaactctcaggaccccaaactccacctcttggattggccctggctgctgccacacacatatccaagagctcagggccagttctggtgggcagcagagacctgctctgccaagttgtccagcagcagagtggccctggcctgggcatcacaagccagtgatgctcctgggaagaccaggtggcaggtcgcagttgggtaccttccattcccaccacacagactctgggcctccccgcaaaatggctccagaattagagtaattatgagatggtgggaaccagagcaactcaggtgcatgatacaaggagaggttgtcatctgggtagggcagagaggagggcttgctcatctgaacaggggtgtatttcattccaggccctcagtctttggcaatggccaccctggtgttggcatattggccccactgtaacttttgggggcttcccggtctagccacaccctcggatggaaagacttgactgcataaagatgtcagttctccctgagttgattgataggcttaatggtcaccctaaaaacacccacatatgcttttcgatggaaccagataagttgacgctaaagttcttatggaaaaatacacacgcaatagctaggaaaacacagggaaagaagagttctgagcagggcctagtcttagccaatattaaaacatactatgaagcctctgatacttaaacagcatggcgctggtacgtaaatagaccaatgcagttaggtggctctttccaagactctggggaaaaaagtagtaaaaagctaaatgcaatcaatcagcaattgaaagctaagtgagagagccagagggcctccttggtggtaaaagagggttgcatttcttgcagccagaaggcagagaaagtgaagaccaagtccagaactgaatcctaagaaatgcaggactgcaaagaaattggtgtgtgtgtgtgtgtgtgtgtgtgtgtgtgtttaatttttaaaaagtttttattcggaatccgcg

SEQ ID NO: 240 - protein, 1087 aa, Homo sapiens
MDLYSTPAAALDRFVARRLQPRKEFVEKARRALGALAAALRERGGRLGAAAPRVLKTVKGGSSGRGTALKGGCDSELVIFLDCFKSYVDQRARRAEILSEMRASLESWWQNPVPGLRLTFPEQSVPGALQFRLTSVDLEDWMDVSLVPAFNVLGQAGSAVKPKPQVYSTLLNSGCQGGEHAACFTELRRNFVNIRPAKLKNLILLVKHWYHQVCLQGLWKETLPPVYALELLTIFAWEQGCKKDAFSLGEGLRTVLGLIQQHQHLCVFWTVNYGFEDPAVGQFLQRHVKRPRPVILDPADPTWDLGNGAAWHWDLHAQEAASCYDHPCFLRGMGDPVQSWKGPGLPRAGCSGLGHPIQLDPNQKTPENSKSLNAVYPRAGSKPPSCPAPGPTAEPASYPSVPGMALDLSQIPTKELDRFIQDHLKPSPQFQEQVKKAIDIILRCLHENCVHKASRVSKGGSFGRGTDLRDGCDVELIIFLNCFTDYKDQGPRRAEILDEMRAHVESWWQDQVPSLSLQFPEQNVPEALQFQLVSTALKSWTDVSLLPAFDAVGQLSSGTKPNPQVYSRLLTSGCQEGEHKACFAELRRNFMNIRPVKLKNLILLVKHWYRQVAAQNKGKGPAPASLPPAYALELLTIFAWEQGCRQDCFNMAQGFRTVLGLVQQHQQLCVYWTVNYSTEDPAMRMHLLGQLRKPRPLVLDPADPTWNVGHGSWELLAQEAAALGMQACFLSRDGTSVQPWDVMPALLYQTPAGDLDKFISEFLQPNRQFLAQVNKAVDTICSFLKENCFRNSPIKVIKVVKGGSSAKGTALRGRSDADLVVFLSCFSQFTEQGNKRAEIISEIRAQLEACQQERQFEVKFEVSKWENPRVLSFSLTSQTMLDQSVDFDVLPAFDALGQLVSGSRPSSQVYVDLIHSYSNAGEYSTCFTELQRDFIISRPTKLKSLIRLVKHWYQQCTKISKGRGSLPPQHGLELLTVYAWEQGGKDSQFNMAEGFRTVLELVTQYRQLCIYWTINYNAKDKTVGDFLKQQLQKPRPIILDPADPTGNLGHNARWDLLAKEAAACTSALCCMGRNGIPIQPWPVKAAV

SEQ ID NO: 241 - DNA, 2077 bp, Homo sapiens
ccgagcgccagcgcggggaaccgggaaaaggaaaccgtgttgtgtacgtaagattcaggaaacgaaaccaggagccgcgggtgttggcgcaaaggttactcccagacccttttccggctgacttctgagaaggttgcgcacagctgtgcccggcagtctagaggcgcagaagaggaagccatcgcctggccccggctctctggaccttgtctcgctcgggagcggaaacagcggcagccagagaactgttttaatcatggacaaacaaaactcacagatgaatgcttctcacccggaaacaaacttgccagttgggtatcctcctcagtatccaccgacagcattccaaggacctccaggatatagtggctaccctgggccccaggtcagctacccacccccaccagccggccattcaggtcctggcccagctggctttcctgtcccaaatcagccagtgtataatcagccagtatataatcagccagttggagctgcaggggtaccatggatgccagcgccacagcctccattaaactgtccacctggattagaatatttaagtcagatagatcagatactgattcatcagcaaattgaacttctggaagttttaacaggttttgaaactaataacaaatatgaaattaagaacagctttggacagagggtttactttgcagcggaagatactgattgctgtacccgaaattgctgtgggccatctagaccttttaccttgaggattattgataatatgggtcaagaagtcataactctggagagaccactaagatgtagcagctgttgttgtccctgctgccttcaggagatagaaatccaagctcctcctggtgtaccaataggttatgttattcagacttggcacccatgtctaccaaagtttacaattcaaaatgagaaaagagaggatgtactaaaaataagtggtccatgtgttgtgtgcagctgttgtggagatgttgattttgagattaaatctcttgatgaacagtgtgtggttggcaaaatttccaagcactggactggaattttgagagaggcatttacagacgctgataactttggaatccagttccctttagaccttgatgttaaaatgaaagctgtaatgattggtgcctgtttcctcattgacttcatgttttttgaaagcactggcagccaggaacaaaaatcaggagtgtggtagtggattagtgaaagtctcctcaggaaatctgaagtctgtatattgattgagactatctaaactcatacctgtatgaattaagctgtaaggcctgtagctctggttgtatacttttgcttttcaaattatagtttatcttctgtataactgatttataaaggtttttgtacattttttaatactcattgtcaatttgagaaaaaggacatatgagtttttgcatttattaatgaaacttcctttgaaaaactgctttgaattatgatctctgattcattgtccattttactaccaaatattaactaaggccttattaatttttatataaattatatcttgtcctattaaatctagttacaatttatttcatgcataagagctaatgttattttgcaaatgccatatattcaaaaaagctcaaagataattttctttactattatgttcaaataatattcaatatgcatattatctttaaaaagttaaatgtttttttaatcttcaagaaatcatgctacacttaacttctcctagaagctaatctataccataatattttcatattcacaagatattaaattaccaattttcaaattattgttagtaaagaacaaaatgattctctcccaaagaaagacacattttaaatactccttcactctaaaactctggtattataacttttgaaagttaatatttctacatgaaatgtttagctcttacactctatccttcctagaaaatggtaattgagattactcagatattaattaaatacaatatcatatatatattcacagagtataaacctaaataatgatctattagattcaaatatttgaaataaaaacttgatttttttgt

SEQ ID NO: 242 - protein, 318 aa, Homo sapiens
MDKQNSQMNASHPETNLPVGYPPQYPPTAFQGPPGYSGYPGPQVSYPPPPAGHSGPGPAGFPVPNQPVYNQPVYNQPVGAAGVPWMPAPQPPLNCPPGLEYLSQIDQILIHQQIELLEVLTGFETNNKYEIKNSFGQRVYFAAEDTDCCTRNCCGPSRPFTLRIIDNMGQEVITLERPLRCSSCCCPCCLQEIEIQAPPGVPIGYVIQTWHPCLPKFTIQNEKREDVLKISGPCVVCSCCGDVDFEIKSLDEQCVVGKISKHWTGILREAFTDADNFGIQFPLDLDVKMKAVMIGACFLIDFMFFESTGSQEQKSGVW

SEQ ID NO: 243 - DNA, 3068 bp, Homo sapiens
cggcagccagctgagagcaatgggaaatggggagtcccagctgtcctcggtgcctgctcagaagctgggttggtttatccaggaatacctgaagccctacgaagaatgtcagacactgatcgacgagatggtgaacaccatctgtgacgtctgcaggaaccccgaacagttccccctggtgcagggagtggccataggtggctcctatggacggaaaacagtcttaagaggcaactccgatggtacccttgtccttttcttcagtgacttaaaacaattccaggatcagaagagaagccaacgtgacatcctcgataaaactggggataagctgaagttctgtctgttcacgaagtggttgaaaaacaatttcgagatccagaagtcccttgatgggtccaccatccaggtgttcacaaaaaatcagagaatctctttcgaggtgctggccgccttcaacgctctgagcttaaatgataatcccagcccctggatctatcgagagctcaaaagatccttggataagacaaatgccagtcctggtgagtttgcagtctgcttcactgaactccagcagaagttttttgacaaccgtcctggaaaactaaaggatttgatcctcttgataaagcactggcatcaacagtgccagaaaaaaatcaaggatttaccctcgctgtctccgtatgccctggagctgcttacggtgtatgcctgggaacaggggtgcagaaaagacaactttgacattgctgaaggcgtcagaacggttctggagctgatcaaatgccaggagaagctgtgtatctattggatggtcaactacaactttgaagatgagaccatcaggaacatcctgctgcaccagctccaatcagcgaggccagtaatcttggatccagttgacccaaccaataatgtgagtggagataaaatatgctggcaatggctgaaaaaagaagctcaaacctggttgacttctcccaacctggataatgagttacctgcaccatcttggaatgtcctgcctgcaccactcttcacgaccccaggccaccttctggataagttcatcaaggagtttctccagcccaacaaatgcttcctagagcagattgacagtgctgttaacatcatccgtacattccttaaagaaaactgcttccgacaatcaacagccaagatccagattgtccggggaggatcaaccgccaaaggcacagctctgaagactggctctgatgccgatctcgtcgtgttccataactcacttaaaagctacacctcccaaaaaaacgagcggcacaaaatcgtcaaggaaatccatgaacagctgaaagccttttggagggagaaggaggaggagcttgaagtcagctttgagcctcccaagtggaaggctcccagggtgctgagcttctctctgaaatccaaagtcctcaacgaaagtgtcagctttgatgtgcttcctgcctttaatgcactgggtcagctgagttctggctccacacccagccccgaggtttatgcagggctcattgatctgtataaatcctcggacctcccgggaggagagttttctacctgtttcacagtcctgcagcgaaacttcattcgctcccggcccaccaaactaaaggatttaattcgcctggtgaagcactggtacaaagagtgtgaaaggaaactgaagccaaaggggtctttgcccccaaagtatgccttggagctgctcaccatctatgcctgggagcaggggagtggagtgccggattttgacactgcagaaggtttccggacagtcctggagctggtcacacaatatcagcagctcggcatcttctggaaggtcaattacaactttgaagatgagaccgtgaggaagtttctactgagccagttgcagaaaaccaggcctgtgatcttggacccaggcgaacccacaggtgacgtgggtggaggggaccgttggtgttggcatcttctggacaaagaagcaaaggttaggttatcctctccctgcttcaaggatgggactggaaacccaataccaccttggaaagtgccggtaaaagtcatctaaaggaggcgttgtctggaaatagccctgtaacaggcttgaatcaaagaacttctcctactgtagcaacctgaaattaactcagacacaaataaaggaaacccagctcacaggagcttaaacagctggtcagcccccctaagcccccactacaagtgatcctcaggcaggtaaccccagattcatgcactgtagggctgggcgcagcatccctaggtctctacccagtagatgccactagccctcctctcccagtgacaaccaaaagtcttcacatgttcaaacgttcccctgggttcacagatctttctgcctttggcttttggctccaccctctttagctgttaatttgagtacttatggccctgaaagcggccacggtgcctccagatggcaggtttgcaatccaagcaggaagaaggaaaagatacccaaaggtcaagaacacagtgattttattagaagtttcatccgcaaattttcttccatttcattgctcagaatgtcatgtggttacctgtaacttgaaggtggctacaaagatgactgtggaggtggttgcacttgccacccaaggatgtctgccacacctctccaagccctcctacctaccaagatatacctgatatatccaccagatatctcctcagatatacttggttctctccaccaggttctttctttaaagcaggattctcaactttgatacttactcacattgggctagacagttctttgtttggaggctctcttgtgcatgtaggatgttgagcagcatgtgtggcctgtacccagtacatgccacccagttgtgacaattaaaagtgtcttgagactttatcatgtgtcttctgccctaggtgagaacccttgcactacaggaaccctacacccaacctggggggaatgtagggaagaggtgccaagccaaccgtggggttagctctaattattaagttatgcattataaataaataccaaaaaattg

SEQ ID NO: 244 - protein, 687 aa, Homo sapiens
MGNGESQLSSVPAQKLGWFIQEYLKPYEECQTLIDEMVNTICDVCRNPEQFPLVQGVAIGGSYGRKTVLRGNSDGTLVLFFSDLKQFQDQKRSQRDILDKTGDKLKFCLFTKWLKNNFEIQKSLDGSTIQVFTKNQRISFEVLAAFNALSLNDNPSPWIYRELKRSLDKTNASPGEFAVCFTELQQKFFDNRPGKLKDLILLIKHWHQQCQKKIKDLPSLSPYALELLTVYAWEQGCRKDNFDIAEGVRTVLELIKCQEKLCIYWMVNYNFEDETIRNILLHQLQSARPVILDPVDPTNNVSGDKICWQWLKKEAQTWLTSPNLDNELPAPSWNVLPAPLFTTPGHLLDKFIKEFLQPNKCFLEQIDSAVNIIRTFLKENCFRQSTAKIQIVRGGSTAKGTALKTGSDADLVVFHNSLKSYTSQKNERHKIVKEIHEQLKAFWREKEEELEVSFEPPKWKAPRVLSFSLKSKVLNESVSFDVLPAFNALGQLSSGSTPSPEVYAGLIDLYKSSDLPGGEFSTCFTVLQRNFIRSRPTKLKDLIRLVKHWYKECERKLKPKGSLPPKYALELLTIYAWEQGSGVPDFDTAEGFRTVLELVTQYQQLGIFWKVNYNFEDETVRKFLLSQLQKTRPVILDPGEPTGDVGGGDRWCWHLLDKEAKVRLSSPCFKDGTGNPIPPWKVPVKVI

SEQ ID NO: 245 - DNA, 1590 bp, Homo sapiens
gaggcagttctgttgccactctctctcctgtcaatgatggatctcagaaataccccagccaaatctctggacaagttcattgaagactatctcttgccagacacgtgtttccgcatgcaaatcgaccatgccattgacatcatctgtgggttcctgaaggaaaggtgcttccgaggtagctcctaccctgtgtgtgtgtccaaggtggtaaagggtggctcctcaggcaagggcaccaccctcagaggccgatctgacgctgacctggttgtcttcctcagtcctctcaccacttttcaggatcagttaaatcgccggggagagttcatccaggaaattaggagacagctggaagcctgtcaaagagagagagcactttccgtgaagtttgaggtccaggctccacgctggggcaacccccgtgcgctcagcttcgtactgagttcgctccagctcggggagggggtggagttcgatgtgctgcctgcctttgatgccctgggtcagttgactggcagctataaacctaacccccaaatctatgtcaagctcatcgaggagtgcaccgacctgcagaaagagggcgagttctccacctgcttcacagaactacagagagacttcctgaagcagcgccccaccaagctcaagagcctcatccgcctagtcaagcactggtaccaaaattgtaagaagaagcttgggaagctgccacctcagtatgccctggagctcctgacggtctatgcttgggagcgagggagcatgaaaacacatttcaacacagcccaaggatttcggacggtcttggaattagtcataaactaccagcaactctgcatctactggacaaagtattatgactttaaaaaccccattattgaaaagtacctgagaaggcagctcacgaaacccaggcctgtgatcctggacccggcggaccctacaggaaacttgggtggtggagacccaaagggttggaggcagctggcacaagaggctgaggcctggctgaattacccatgctttaagaattgggatgggtccccagtgagctcctggattctgctggctgaaagcaacagtacagacgatgagaccgacgatcccaggacgtatcagaaatatggttacattggaacacatgagtaccctcatttctctcatagacccagcacgctccaggcagcatccaccccacaggcagaagaggactggacctgcaccatcctctgaatgccagtgcatcttgggggaaagggctccagtgttatctggaccagttccttcattttcaggtgggactcttgatccagagaagacaaagctcctcagtgagctggtgtataatccaagacagaacccaagtctcctgactcctggccttctatgccctctatcctatcatagataacattctccacagcctcacttcattccacctattctctgaaaatattccctgagagagaacagagagatttagataagagaatgaaattccagccttgactttcttctgtgcacctgatgggagggtaatgtctaatgtattatcaataacaataaaaataaagcaaataccaaaaa

SEQ ID NO: 246 - protein, 400 aa, Homo sapiens
MMDLRNTPAKSLDKFIEDYLLPDTCFRMQIDHAIDIICGFLKERCFRGSSYPVCVSKVVKGGSSGKGTTLRGRSDADLVVFLSPLTTFQDQLNRRGEFIQEIRRQLEACQRERALSVKFEVQAPRWGNPRALSFVLSSLQLGEGVEFDVLPAFDALGQLTGSYKPNPQIYVKLIEECTDLQKEGEFSTCFTELQRDFLKQRPTKLKSLIRLVKHWYQNCKKKLGKLPPQYALELLTVYAWERGSMKTHFNTAQGFRTVLELVINYQQLCIYWTKYYDFKNPIIEKYLRRQLTKPRPVILDPADPTGNLGGGDPKGWRQLAQEAEAWLNYPCFKNWDGSPVSSWILLAESNSTDDETDDPRTYQKYGYIGTHEYPHFSHRPSTLQAASTPQAEEDWTCTIL

SEQ ID NO: 247 - DNA, 1820 bp, Homo sapiens
acagagatggcactgatgcaggaactgtatagcacaccagcctccaggctggactccttcgtggctcagtggctgcagccccaccgggagtggaaggaagaggtgctagacgctgtgcggaccgtggaggagtttctgaggcaggagcatttccaggggaagcgtgggctggaccaggatgtgcgggtgctgaaggtagtcaaggtgggctccttcgggaatggcacggttctcaggagcaccagagaggtggagctggtggcgtttctgagctgtttccacagcttccaggaggcagccaagcatcacaaagatgttctgaggctgatatggaaaaccatgtggcaaagccaggacctgctggacctcgggctcgaggacctgaggatggagcagagagtccccgatgctcttgtcttcaccatccagaccagggggactgcggagcccatcacggtcaccattgtgcctgcctacagagccctggggccttctcttcccaactcccagccaccccctgaggtctatgtgagcctgatcaaggcctgcggtggtcctggaaatttctgcccatccttcagcgagctgcagagaaatttcgtgaaacatcggccaactaagctgaagagcctcctgcgcctggtgaaacactggtaccagcagtatgtgaaagccaggtcccccagagccaatctgccccctctctatgctcttgaacttctaaccatctatgcctgggaaatgggtactgaagaagacgagaatttcatgttggacgaaggcttcaccactgtgatggacctgctcctggagtatgaagtcatctgtatctactggaccaagtactacacactccacaatgcaatcattgaggattgtgtcagaaaacagctcaaaaaagagaggcccatcatcctggatccggccgaccccaccctcaacgtggcagaagggtacagatgggacatcgttgctcagagggcctcccagtgcctgaaacaggactgttgctatgacaacagggagaaccccatctccagctggaacgtgaagagggcacgagacatccacttgacagtggagcagaggggttacccagatttcaacctcatcgtgaacccttatgagcccataaggaaggttaaagagaaaatccggaggaccaggggctactctggcctgcagcgtctgtccttccaggttcctggcagtgagaggcagcttctcagcagcaggtgctccttagccaaatatgggatcttctcccacactcacatctatctgctggagaccatcccctccgagatccaggtcttcgtgaagaatcctgatggtgggagctacgcctatgccatcaaccccaacagcttcatcctgggtctgaagcagcagattgaagaccagcaggggcttcctaaaaagcagcagcagctggaattccaaggccaagtcctgcaggactggttgggtctggggatctatggcatccaagacagtgacactctcatcctctcgaagaagaaaggagaggctctgtttccagccagttagttttctctgggagacttctctgtacatttctgccatgtactccagaactcatcctgtcaatcactctgtcccattgtctactgggaaggtcccaggtcttcaccagttttacaatgagttatcccaggccagacgtggtagctcacacctgtaatcccagaactttgggaggccgaggtgggaggagcgcttgagccgaggagttcaagaccagcctgggtatcatagggagaccccgtctctacaaaataaaaaaataattcactggg

SEQ ID NO: 248 - protein, 514 aa, Homo sapiens
MALMQELYSTPASRLDSFVAQWLQPHREWKEEVLDAVRTVEEFLRQEHFQGKRGLDQDVRVLKVVKVGSFGNGTVLRSTREVELVAFLSCFHSFQEAAKHHKDVLRLIWKTMWQSQDLLDLGLEDLRMEQRVPDALVFTIQTRGTAEPITVTIVPAYRALGPSLPNSQPPPEVYVSLIKACGGPGNFCPSFSELQRNFVKHRPTKLKSLLRLVKHWYQQYVKARSPRANLPPLYALELLTIYAWEMGTEEDENFMLDEGFTTVMDLLLEYEVICIYWTKYYTLHNAIIEDCVRKQLKKERPIILDPADPTLNVAEGYRWDIVAQRASQCLKQDCCYDNRENPISSWNVKRARDIHLTVEQRGYPDFNLIVNPYEPIRKVKEKIRRTRGYSGLQRLSFQVPGSERQLLSSRCSLAKYGIFSHTHIYLLETIPSEIQVFVKNPDGGSYAYAINPNSFILGLKQQIEDQQGLPKKQQQLEFQGQVLQDWLGLGIYGIQDSDTLILSKKKGEALFPAS

SEQ ID NO: 249 - DNA, 2693 bp, Homo sapiens
cgaaaaaagaggggaagagtattaaagaccatttctggctgggcagggcactctcagcagctcaactgcccagcgtgaccagtggccacctctgcagtgtcttccacaacctggtcttgactcgtctgctgaacaaatcctctgacctcaggccggctgtgaacgtagttcctgagagatagcaaacatgcccaacagtgagcccgcatctctgctggagctgttcaacagcatcgccacacaaggggagctcgtaaggtccctcaaagcgggaaatgcgtcaaaggatgaaattgattctgcagtaaagatgttggtgtcattaaaaatgagctacaaagctgccgcgggggaggattacaaggctgactgtcctccagggaacccagcacctaccagtaatcatggcccagatgccacagaagctgaagaggattttgtggacccatggacagtacagacaagcagtgcaaaaggcatagactacgataagctcattgttcggtttggaagtagtaaaattgacaaagagctaataaaccgaatagagagagccaccggccaaagaccacaccacttcctgcgcagaggcatcttcttctcacacagagatatgaatcaggttcttgatgcctatgaaaataagaagccattttatctgtacacgggccggggcccctcttctgaagcaatgcatgtaggtcacctcattccatttattttcacaaagtggctccaggatgtatttaacgtgcccttggtcatccagatgacggatgacgagaagtatctgtggaaggacctgaccctggaccaggcctatggcgatgctgttgagaatgccaaggacatcatcgcctgtggctttgacatcaacaagactttcatattctctgacctggactacatggggatgagctcaggtttctacaaaaatgtggtgaagattcaaaagcatgttaccttcaaccaagtgaaaggcattttcggcttcactgacagcgactgcattgggaagatcagttttcctgccatccaggctgctccctccttcagcaactcattcccacagatcttccgagacaggacggatatccagtgccttatcccatgtgccattgaccaggatccttactttagaatgacaagggacgtcgcccccaggatcggctatcctaaaccagccctgttgcactccaccttcttcccagccctgcagggcgcccagaccaaaatgagtgccagcgacccaaactcctccatcttcctcaccgacacggccaagcagatcaaaaccaaggtcaataagcatgcgttttctggagggagagacaccatcgaggagcacaggcagtttgggggcaactgtgatgtggacgtgtctttcatgtacctgaccttcttcctcgaggacgacgacaagctcgagcagatcaggaaggattacaccagcggagccatgctcaccggtgagctcaagaaggcactcatagaggttctgcagcccttgatcgcagagcaccaggcccggcgcaaggaggtcacggatgagatagtgaaagagttcatgactccccggaagctgtccttcgactttcagtagcactcgttttacatatgcttataaaagaagtgatgtatcagtaatgtatcaataatcccagcccagtcaaagcaccgccacctgtaggcttctgtctcatggtaattactgggcctggcctctgtaagcctgtgtatgttatcaatactgtttcttcctgtgagttccattatttctatctcttatgggcaaagcattgtgggtaattggtgctggctaacattgcatggtcggatagagaagtccagctgtgagtctctccccaaagcagccccacagtggagccttcggctggaagtccatgggccaccctgttcttgtccatggaggacttccgagggttccaagtatactcttaagacccactctgtttaaaaatatatattctatgtatgcgtatatggaattgaaatgtcattattgtaacctagaaagtgctttgaaatattgatgtggggaggtttattgagcacaagatgtatttcagcccatgccccctcccaaaaagaaattgataagtaaaagcttcgttatacatttgactaagaaatcacccagctttaaagctgcttttaacaatgaagattgaacagagttcagcaattttgattaaattaagacttgggggtgaaactttccagtttactgaactccagaccatgcatgtagtccactccagaaatcatgctcgcttcccttggcacaccagtgttctcctgccaaatgaccctagaccctctgtcctgcagagtcagggtggcttttcccctgactgtgtccgatgccaaggagtcctggcctccgcagatgcttcattttgacccttggctgcagtggaagtcagcacagagcagtgccctggctgtgtcctggacgggtggacttagctagggagaaagtcgaggcagcagccctcgaggccctcacagatgtctaggcaggcctcatttcatcacgcagcatgtgcaggcctggaagagcaaagccaaatctcagggaagtccttggttgatgtatctgggtctcctctggagcactctgccctcctgtcacccagtagagtaaataaacttccttggctcctaaaaaa

SEQ ID NO: 250 - protein, 471 aa, Homo sapiens
MPNSEPASLLELFNSIATQGELVRSLKAGNASKDEIDSAVKMLVSLKMSYKAAAGEDYKADCPPGNPAPTSNHGPDATEAEEDFVDPWTVQTSSAKGIDYDKLIVRFGSSKIDKELINRIERATGQRPHHFLRRGIFFSHRDMNQVLDAYENKKPFYLYTGRGPSSEAMHVGHLIPFIFTKWLQDVFNVPLVIQMTDDEKYLWKDLTLDQAYGDAVENAKDIIACGFDINKTFIFSDLDYMGMSSGFYKNVVKIQKHVTFNQVKGIFGFTDSDCIGKISFPAIQAAPSFSNSFPQIFRDRTDIQCLIPCAIDQDPYFRMTRDVAPRIGYPKPALLHSTFFPALQGAQTKMSASDPNSSIFLTDTAKQIKTKVNKHAFSGGRDTIEEHRQFGGNCDVDVSFMYLTFFLEDDDKLEQIRKDYTSGAMLTGELKKALIEVLQPLIAEHQARRKEVTDEIVKEFMTPRKLSFDFQ

SEQ ID NO: 251 - DNA, 2961 bp, Homo sapiens
aagagatgatttctccatcctgaacgtgcagcgagcttgtcaggaagatcggaggtgccaagtagcagagaaagcatcccccagctctgacagggagacagcacatgtctaaggcccacaagccttggccctaccggaggagaagtcaattttcttctcgaaaatacctgaaaaaagaaatgaattccttccagcaacagccaccgccattcggcacagtgccaccacaaatgatgtttcctccaaactggcagggggcagagaaggacgctgctttcctcgccaaggacttcaactttctcactttgaacaatcagccaccaccaggaaacaggagccaaccaagggcaatggggcccgagaacaacctgtacagccagtacgagcagaaggtgcgcccctgcattgacctcatcgactccctgcgggctctgggtgtggagcaggacctggccctgccagccatcgccgtcatcggggaccagagctcgggcaagagctctgtgctggaggcactgtcaggagtcgcgcttcccagaggcagcggaatcgtaaccaggtgtccgctggtgctgaaactgaaaaagcagccctgtgaggcatgggccggaaggatcagctaccggaacaccgagctagagcttcaggaccctggccaggtggagaaagagatacacaaagcccagaacgtcatggccgggaatggccggggcatcagccatgagctcatcagcctggagatcacctcccctgaggttccagacctgaccatcattgaccttcccggcatcaccagggtggctgtggacaaccagccccgagacatcggactgcagatcaaggctctcatcaagaagtacatccagaggcagcagacgatcaacttggtggtggttccctgtaacgtggacattgccaccacggaggcgctgagcatggcccatgaggtggacccggaaggggacaggaccatcggtatcctgaccaaaccagatctaatggacaggggcactgagaaaagcgtcatgaatgtggtgcggaacctcacgtaccccctcaagaagggctacatgattgtgaagtgccggggccagcaggagatcacaaacaggctgagcttggcagaggcaaccaagaaagaaattacattctttcaaacacatccatatttcagagttctcctggaggaggggtcagccacggttccccgactggcagaaagacttaccactgaactcatcatgcatatccaaaaatcgctcccgttgttagaaggacaaataagggagagccaccagaaggcgaccgaggagctgcggcgttgcggggctgacatccccagccaggaggccgacaagatgttctttctaattgagaaaatcaagatgtttaatcaggacatcgaaaagttagtagaaggagaagaagttgtaagggagaatgagacccgtttatacaacaaaatcagagaggattttaaaaactgggtaggcatacttgcaactaatacccaaaaagttaaaaatattatccacgaagaagttgaaaaatatgaaaagcagtatcgaggcaaggagcttctgggatttgtcaactacaagacatttgagatcatcgtgcatcagtacatccagcagctggtggagcccgcccttagcatgctccagaaagccatggaaattatccagcaagctttcattaacgtggccaaaaaacattttggcgaatttttcaaccttaaccaaactgttcagagcacgattgaagacataaaagtgaaacacacagcaaaggcagaaaacatgatccaacttcagttcagaatggagcagatggttttttgtcaagatcagatttacagtgttgttctgaagaaagtccgagaagagatttttaaccctctggggacgccttcacagaatatgaagttgaactctcattttcccagtaatgagtcttcggtttcctcctttactgaaataggcatccacctgaatgcctacttcttggaaaccagcaaacgtctcgccaaccagatcccatttataattcagtattttatgctccgagagaatggtgactccttgcagaaagccatgatgcagatactacaggaaaaaaatcgctattcctggctgcttcaagagcagagtgagaccgctaccaagagaagaatccttaaggagagaatttaccggctcactcaggcgcgacacgcactctgtcaattctccagcaaagagatccactgaagggcggcgatgcctgtggttgttttcttgtgcgtactcattcattctaaggggagtcggtgcaggatgccgcttctgctttggggccaaactcttctgtcactatcagtgtccatctctactgtactccctcagcatcagagcatgcatcaggggtccacacaggctcagctctctccaccacccagctcttccctgaccttcacgaagggatggctctccagtccttgggtcccgtagcacacagttacagtgtcctaagatactgctatcattcttcgctaatttgtatttgtattcccttccccctacaagattatgagaccccagagggggaaggtctgggtcaaattcttcttttgtatgtccagtctcctgcacagcacctgcagcattgtaactgcttaataaatgacatctcactgaacgaatgagtgctgtgtaagtgatggagatacctgaggctattgctcaagcccaggccttggacatttagtgactgttagccggtccctttcagatccagtggccatgccccctgcttcccatggttcactgtcattgtgtttcccagcctctccactcccccgccagaaaggagcctgagtgattctcttttcttcttgtttccctgattatgatgagcttccattgttctgttaagtcttgaagaggaatttaataaagcaaagaaactttttaaaaacgt

SEQ ID NO: 252 - protein, 715 aa, Homo sapiens
MSKAHKPWPYRRRSQFSSRKYLKKEMNSFQQQPPPFGTVPPQMMFPPNWQGAEKDAAFLAKDFNFLTLNNQPPPGNRSQPRAMGPENNLYSQYEQKVRPCIDLIDSLRALGVEQDLALPAIAVIGDQSSGKSSVLEALSGVALPRGSGIVTRCPLVLKLKKQPCEAWAGRISYRNTELELQDPGQVEKEIHKAQNVMAGNGRGISHELISLEITSPEVPDLTIIDLPGITRVAVDNQPRDIGLQIKALIKKYIQRQQTINLVVVPCNVDIATTEALSMAHEVDPEGDRTIGILTKPDLMDRGTEKSVMNVVRNLTYPLKKGYMIVKCRGQQEITNRLSLAEATKKEITFFQTHPYFRVLLEEGSATVPRLAERLTTELIMHIQKSLPLLEGQIRESHQKATEELRRCGADIPSQEADKMFFLIEKIKMFNQDIEKLVEGEEVVRENETRLYNKIREDFKNWVGILATNTQKVKNIIHEEVEKYEKQYRGKELLGFVNYKTFEIIVHQYIQQLVEPALSMLQKAMEIIQQAFINVAKKHFGEFFNLNQTVQSTIEDIKVKHTAKAENMIQLQFRMEQMVFCQDQIYSVVLKKVREEIFNPLGTPSQNMKLNSHFPSNESSVSSFTEIGIHLNAYFLETSKRLANQIPFIIQYFMLRENGDSLQKAMMQILQEKNRYSWLLQEQSETATKRRILKERIYRLTQARHALCQFSSKEIH

SEQ ID NO: 253 - DNA, 597 bp, Homo sapiens
agctgaagttgaggatctcttactctctaagccacggaattaacccgagcaggcatggaggcctctgctctcacctcatcagcagtgaccagtgtggccaaagtggtcagggtggcctctggctctgccgtagttttgcccctggccaggattgctacagttgtgattggaggagttgtggccatggcggctgtgcccatggtgctcagtgccatgggcttcactgcggcgggaatcgcctcgtcctccatagcagccaagatgatgtccgcggcggccattgccaatgggggtggagttgcctcgggcagccttgtgggtactctgcagtcactgggagcaactggactctccggattgaccaagttcatcctgggctccattgggtctgccattgcggctgtcattgcgaggttctactagctccctgcccctcgccctgcagagaagagaaccatgccaggggagaaggcacccagccatcctgacccagcgaggagccaactatcccaaatatacctgggtgaaatataccaaattctgcatctccagaggaaaataagaaataaagatgaattgttgcaactcttaaaaaaa

SEQ ID NO: 254 - protein, 122 aa, Homo sapiens
MEASALTSSAVTSVAKVVRVASGSAVVLPLARIATVVIGGVVAMAAVPMVLSAMGFTAAGIASSSIAAKMMSAAAIANGGGVASGSLVGTLQSLGATGLSGLTKFILGSIGSAIAAVIARFY

SEQ ID NO: 255 - DNA, 1919 bp, Homo sapiens
ctgaagaacaaatcagcctggtcaccagcttttcggaacagcagagacacagagggcagtcatgagtgaggtcaccaagaattccctggagaaaatccttccacagctgaaatgccatttcacctggaacttattcaaggaagacagtgtctcaagggatctagaagatagagtgtgtaaccagattgaatttttaaacactgagttcaaagctacaatgtacaacttgttggcctacataaaacacctagatggtaacaacgaggcagccctggaatgcttacggcaagctgaagagttaatccagcaagaacatgctgaccaagcagaaatcagaagtctagtcacttggggaaactacgcctgggtctactatcacttgggcagactctcagatgctcagatttatgtagataaggtgaaacaaacctgcaagaaattttcaaatccatacagtattgagtattctgaacttgactgtgaggaagggtggacacaactgaagtgtggaagaaatgaaagggcgaaggtgtgttttgagaaggctctggaagaaaagcccaacaacccagaattctcctctggactggcaattgcgatgtaccatctggataatcacccagagaaacagttctctactgatgttttgaagcaggccattgagctgagtcctgataaccaatacgtcaaggttctcttgggcctgaaactgcagaagatgaataaagaagctgaaggagagcagtttgttgaagaagccttggaaaagtctccttgccaaacagatgtcctccgcagtgcagccaaattttacagaagaaaaggtgacctagacaaagctattgaactgtttcaacgggtgttggaatccacaccaaacaatggctacctctatcaccagattgggtgctgctacaaggcaaaagtaagacaaatgcagaatacaggagaatctgaagctagtggaaataaagagatgattgaagcactaaagcaatatgctatggactattcgaataaagctcttgagaagggactgaatcctctgaatgcatactccgatctcgctgagttcctggagacggaatgttatcagacaccattcaataaggaagtccctgatgctgaaaagcaacaacaatcccatcagcgctactgcaaccttcagaaatataatgggaagtctgaagacactgctgtgcaacatggtttagagggtttgtccataagcaaaaaatcaactgacaaggaagagatcaaagaccaaccacagaatgtatctgaaaatctgcttccacaaaatgcaccaaattattggtatcttcaaggattaattcataagcagaatggagatctgctgcaagccaaatgttatgagaaggaactgggccgcctgctaagggatgccccttcaggcataggcagtattttcctgtcagcatctgagcttgaggatggtagtgaggaaatgggccagggcgcagtcagctccagtcccagagagctcctctctaactcagagcaactgaactgagacagaggaggaaaacagagcatcagaagcctgcagtggtggttgtgacgggtaggaggataggaagacagggggcccaacctgggattgctgagcagggaagctttgcatgttgctctaaggtacatttttaaagagttgttttttggccgggcgcagtgctcatgcctgtaatcccagaactttgggaggccgaggtgggcggatcacgaggtctggagtttgagaccatcctggctaacacagtgaaatcccgtctctactaaaaatacaaaaaattagccaggcgtggtggctggcacctgtagtcccagctacttgggaggctgaggcaggagaatggcgtgaacctggaaggaagaggttgcagagagccaagattgcg

SEQ ID NO: 256 - protein, 490 aa, Homo sapiens
MSEVTKNSLEKILPQLKCHFTWNLFKEDSVSRDLEDRVCNQIEFLNTEFKATMYNLLAYIKHLDGNNEAALECLRQAEELIQQEHADQAEIRSLVTWGNYAWVYYHLGRLSDAQIYVDKVKQTCKKFSNPYSIEYSELDCEEGWTQLKCGRNERAKVCFEKALEEKPNNPEFSSGLAIAMYHLDNHPEKQFSTDVLKQAIELSPDNQYVKVLLGLKLQKMNKEAEGEQFVEEALEKSPCQTDVLRSAAKFYRRKGDLDKAIELFQRVLESTPNNGYLYHQIGCCYKAKVRQMQNTGESEASGNKEMIEALKQYAMDYSNKALEKGLNPLNAYSDLAEFLETECYQTPFNKEVPDAEKQQQSHQRYCNLQKYNGKSEDTAVQHGLEGLSISKKSTDKEEIKDQPQNVSENLLPQNAPNYWYLQGLIHKQNGDLLQAKCYEKELGRLLRDAPSGIGSIFLSASELEDGSEEMGQGAVSSSPRELLSNSEQLN

SEQ ID NO: 257 - DNA, 841 bp, Homo sapiens
gaaccgtttactcgctgctgtgcccatctatcagcaggctccgggctgaagattgcttctcttctctcctccaaggtctagtgacggagcccgcgcgcggcgccaccatgcggcagaaggcggtatcgcttttcttgtgctacctgctgctcttcacttgcagtggggtggaggcaggtgagaatgcgggtaaggatgcaggtaagaaaaagtgctcggagagctcggacagcggctccgggttctggaaggccctgaccttcatggccgtcggaggaggactcgcagtcgccgggctgcccgcgctgggcttcaccggcgccggcatcgcggccaactcggtggctgcctcgctgatgagctggtctgcgatcctgaatgggggcggcgtgcccgccggggggctagtggccacgctgcagagcctcggggctggtggcagcagcgtcgtcataggtaatattggtgccctgatgggctacgccacccacaagtatctcgatagtgaggaggatgaggagtagccagcagctcccagaacctcttcttccttcttggcctaactcttccagttaggatctagaactttgcctttttttttttttttttttttttttgagatgggttctcactatattgtccaggctagagtgcagtggctattcacagatgcgaacatagtacactgcagcctccaactcctagcctcaagtgatcctcctgtctcaacctcccaagtaggattacaagcatgcgccgacgatgcccagaatccagaactttgtctatcactctccccaacaacctagatgtgaaaacagaataaacttcacccagaaaa

SEQ ID NO: 258 - protein, 138 aa, Homo sapiens
MRQKAVSLFLCYLLLFTCSGVEAGENAGKDAGKKKCSESSDSGSGFWKALTFMAVGGGLAVAGLPALGFTGAGIAANSVAASLMSWSAILNGGGVPAGGLVATLQSLGAGGSSVVIGNIGALMGYATHKYLDSEEDEE

SEQ ID NO: 259 - DNA, 2290 bp, Homo sapiens
cttcacctcttcaaccaggagccgagatttctgttgctctgaagccatccaggggtctttaaccagaagagagaggagagcctcaggagttaggaccagaagaagccagggaagcagtgcaatggcttcaaaaatcttgcttaacgtacaagaggaggtgacctgtcccatctgcctggagctgttgacagaacccttgagtctagactgtggccacagcctctgccgagcctgcatcactgtgagcaacaaggaggcagtgaccagcatgggaggaaaaagcagctgtcctgtgtgtggtatcagttactcatttgaacatctacaggctaatcagcatctggccaacatagtggagagactcaaggaggtcaagttgagcccagacaatgggaagaagagagatctctgtgatcatcatggagagaaactcctactcttctgtaaggaggataggaaagtcatttgctggctttgtgagcggtctcaggagcaccgtggtcaccacacagtcctcacggaggaagtattcaaggaatgtcaggagaaactccaggcagtcctcaagaggctgaagaaggaagaggaggaagctgagaagctggaagctgacatcagagaagagaaaacttcctggaagtatcaggtacaaactgagagacaaaggatacaaacagaatttgatcagcttagaagcatcctaaataatgaggagcagagagagctgcaaagattggaagaagaagaaaagaagacgctggataagtttgcagaggctgaggatgagctagttcagcagaagcagttggtgagagagctcatctcagatgtggagtgtcggagtcagtggtcaacaatggagctgctgcaggacatgagtggaatcatgaaatggagtgagatctggaggctgaaaaagccaaaaatggtttccaagaaactgaagactgtattccatgctccagatctgagtaggatgctgcaaatgtttagagaactgacagctgtccggtgctactgggtggatgtcacactgaattcagtcaacctaaatttgaatcttgtcctttcagaagatcagagacaagtgatatctgtgccaatttggccttttcagtgttataattatggtgtcttgggatcccaatatttctcctctgggaaacattactgggaagtggacgtgtccaagaaaactgcctggatcctgggggtatactgtagaacatattcccgccatatgaagtatgttgttagaagatgtgcaaatcgtcaaaatctttacaccaaatacagacctctatttggctactgggttatagggttacagaataaatgtaagtatggtgtctttgaagagtctttgtcctctgatcccgaggttttgactctctccatggctgtgcctccctgccgtgttggggttttcctcgactatgaagcaggcattgtctcatttttcaatgtcacaagccatggctccctcatttacaagttctctaaatgttgcttttctcagcctgtttatccatatttcaatccttggaactgtccagctcccatgactctatgcccaccaagctcttgaattttctcatttcttcacctacaaccctttgtctcgacttatctcctgcaactgactcatctgcaacattcacaccattgcttccttgtggtttcccttctttagaacttttactcatccttgagatgtatggtgtatttggcttgagttatgagagatgcttatttattcatttactctttttcatattttcagagaaagttacctaatccctcctaaagacacagcagtatgggtataacatccttgccttcccatttatccatgtttcactttatcactgatgtgaagaggcccaaagcctgttagccaccatccatgctacctaggtagtccataggaaccacccccatgaccaccaccaacatcaactaaaggttcttggagggtatgtcagtgtgttgctcaggataccccaggtacatcaaggaatcaaggagaggaaaatatgagcaatatgtgtattcagagtgaagattttatgtccagagtatttgagctcaaaccttgcctgttgttttctaatcatgatgaatactttctcagtttctttttcctgaaatataaattgggatttaagactgtacctaactattaagatcactgtgtaaaactaagtgtctctaaatgtaatgcatcgatttagtgtctggaacataataaatatttgctctcatgattgctaaaaaaaaaaaaaaaaaa

SEQ ID NO: 260 - protein, 488 aa, Homo sapiens
MASKILLNVQEEVTCPICLELLTEPLSLDCGHSLCRACITVSNKEAVTSMGGKSSCPVCGISYSFEHLQANQHLANIVERLKEVKLSPDNGKKRDLCDHHGEKLLLFCKEDRKVICWLCERSQEHRGHHTVLTEEVFKECQEKLQAVLKRLKKEEEEAEKLEADIREEKTSWKYQVQTERQRIQTEFDQLRSILNNEEQRELQRLEEEEKKTLDKFAEAEDELVQQKQLVRELISDVECRSQWSTMELLQDMSGIMKWSEIWRLKKPKMVSKKLKTVFHAPDLSRMLQMFRELTAVRCYWVDVTLNSVNLNLNLVLSEDQRQVISVPIWPFQCYNYGVLGSQYFSSGKHYWEVDVSKKTAWILGVYCRTYSRHMKYVVRRCANRQNLYTKYRPLFGYWVIGLQNKCKYGVFEESLSSDPEVLTLSMAVPPCRVGVFLDYEAGIVSFFNVTSHGSLIYKFSKCCFSQPVYPYFNPWNCPAPMTLCPPSS

SEQ ID NO: 261 - DNA, 2015 bp, Homo sapiens
cggaggcacggaagatgaggaagatgatcaggaggatgatgaaggtgaagagggagatgaagacgatgacgacgatggctctgaggggacctcaggggctgccgagctgggggggcgctcaagctgcgaggatccgggctgcccgcgagacgaggagcgggcgccaggatggggtcgatgaagtccaagttcctccaggtcggaggcaatacattctcaaaaactgaaaccagcgccagcccacactgtcctgtgtacgtgccggatcccacatccaccatcaagccggggcctaatagccacaacagcaacacaccaggaatcagggaggcaggctctgaggacatcatcgtggttgccctgtatgattacgaggccattcaccacgaagacctcagcttccagaagggggaccagatggtggtcctagaggaatccggggagtggtggaaggctcgatccctggccacccggaaggagggctacatcccaagcaactatgtcgcccgcgttgactctctggagacagaggagtggtttttcaagggcatcagccggaaggacgcagagcgccaactgctggctcccggcaacatgctgggctccttcatgatccgggatagcgagaccactaaaggaagctactctttgtccgtgcgagactacgaccctcggcagggagataccgtgaaacattacaagatccggaccctggacaacgggggcttctacatatccccccgaagcaccttcagcactctgcaggagctggtggaccactacaagaaggggaacgacgggctctgccagaaactgtcggtgccctgcatgtcttccaagccccagaagccttgggagaaagatgcctgggagatccctcgggaatccctcaagctggagaagaaacttggagctgggcagtttggggaagtctggatggccacctacaacaagcacaccaaggtggcagtgaagacgatgaagccagggagcatgtcggtggaggccttcctggcagaggccaacgtgatgaaaactctgcagcatgacaagctggtcaaacttcatgcggtggtcaccaaggagcccatctacatcatcacggagttcatggccaaaggaagcttgctggactttctgaaaagtgatgagggcagcaagcagccattgccaaaactcattgacttctcagcccagattgcagaaggcatggccttcatcgagcagaggaactacatccaccgagacctccgagctgccaacatcttggtctctgcatccctggtgtgtaagattgctgactttggcctggcccgggtcattgaggacaacgagtacacggctcgggaaggggccaagttccccatcaagtggacagctcctgaagccatcaactttggctccttcaccatcaagtcagacgtctggtcctttggtatcctgctgatggagatcgtcacctacggccggatcccttacccagggatgtcaaaccctgaagtgatccgagctctggagcgtggataccggatgcctcgcccagagaactgcccagaggagctctacaacatcatgatgcgctgctggaaaaaccgtccggaggagcggccgaccttcgaatacatccagagtgtgctggatgacttctacacggccacagagagccagtaccaacagcagccatgatagggaggaccagggcagggcagggggtgcccaggtggtggctcgaaggtggctccagcaccatccgccagggcccacacccccttcctactcccagacacccaccctcgcttcagccacagtttcctcatctgtccagtgggtaggttggactggaaaatctctttttgactcttgcaatccacaatctgacattctcaggaagcccccaagttgatatttctatttcctggaatggttggattttagttacagctgtgatttggaagggaaactttcaaaatagtgaaatgaatatttaaataaaagatataaatgcaagtcttacg

SEQ ID NO: 262 - protein, 505 aa, Homo sapiens
MGSMKSKFLQVGGNTFSKTETSASPHCPVYVPDPTSTIKPGPNSHNSNTPGIREAGSEDIIVVALYDYEAIHHEDLSFQKGDQMVVLEESGEWWKARSLATRKEGYIPSNYVARVDSLETEEWFFKGISRKDAERQLLAPGNMLGSFMIRDSETTKGSYSLSVRDYDPRQGDTVKHYKIRTLDNGGFYISPRSTFSTLQELVDHYKKGNDGLCQKLSVPCMSSKPQKPWEKDAWEIPRESLKLEKKLGAGQFGEVWMATYNKHTKVAVKTMKPGSMSVEAFLAEANVMKTLQHDKLVKLHAVVTKEPIYIITEFMAKGSLLDFLKSDEGSKQPLPKLIDFSAQIAEGMAFIEQRNYIHRDLRAANILVSASLVCKIADFGLARVIEDNEYTAREGAKFPIKWTAPEAINFGSFTIKSDVWSFGILLMEIVTYGRIPYPGMSNPEVIRALERGYRMPRPENCPEELYNIMMRCWKNRPEERPTFEYIQSVLDDFYTATESQYQQQP

SEQ ID NO: 263 - DNA, 1637 bp, Homo sapiens
gaggcgaaccggagcgcggggccgcggtcgccccgaccagagccgggagaccgcagcacccgcagccgcccgcgagcgcgccgaagacagcgcgcaggcgagagcgcgcgggcgggggcgcgcaggccctgcccgccccttccgtccccacccccctccgccctttcctctccccaccttcctctcgcctcccgcgcccccgcaccgggcgcccaccctgtcctcctcctgcgggagcgttgtccgtgttggcggccgcagcgggccgggccggtccggcgggccgggggatggcgctgctggacctggccttggagggaatggccgtcttcgggttcgtcctcttcttggtgctgtggctgatgcatttcatggctatcatctacacccgattacacctcaacaagaaggcaactgacaaacagccttatagcaagctcccaggtgtctctcttctgaaaccactgaaaggggtagatcctaacttaatcaacaacctggaaacattctttgaattggattatcccaaatatgaagtgctcctttgtgtacaagatcatgatgatccagccattgatgtatgtaagaagcttcttggaaaatatccaaatgttgatgctagattgtttataggtggtaaaaaagttggcattaatcctaaaattaataatttaatgccaggatatgaagttgcaaagtatgatcttatatggatttgtgatagtggaataagagtaattccagatacgcttactgacatggtgaatcaaatgacagaaaaagtaggcttggttcacgggctgccttacgtagcagacagacagggctttgctgccaccttagagcaggtatattttggaacttcacatccaagatactatatctctgccaatgtaactggtttcaaatgtgtgacaggaatgtcttgtttaatgagaaaagatgtgttggatcaagcaggaggacttatagcttttgctcagtacattgccgaagattactttatggccaaagcgatagctgaccgaggttggaggtttgcaatgtccactcaagttgcaatgcaaaactctggctcatattcaatttctcagtttcaatccagaatgatcaggtggaccaaactacgaattaacatgcttcctgctacaataatttgtgagccaatttcagaatgctttgttgccagtttaattattggatgggcagcccaccatgtgttcagatgggatattatggtatttttcatgtgtcattgcctggcatggtttatatttgactacattcaactcaggggtgtccagggtggcacactgtgtttttcaaaacttgattatgcagtcgcctggttcatccgcgaatccatgacaatatacatttttttgtctgcattatgggacccaactataagctggagaactggtcgctacagattacgctgtgggggtacagcagaggaaatcctagatgtataactacagctttgtgactgtatataaaggaaaaaagagaagtattataaattatgtttatataaatgcttttaaaaatctaccttctgtagttttatcacatgtatgttttggtatctgttctttaatttatttttgcatggcacttgcatctgtgaaaaaaaa

SEQ ID NO: 264 - protein, 394 aa, Homo sapiens
MALLDLALEGMAVFGFVLFLVLWLMHFMAIIYTRLHLNKKATDKQPYSKLPGVSLLKPLKGVDPNLINNLETFFELDYPKYEVLLCVQDHDDPAIDVCKKLLGKYPNVDARLFIGGKKVGINPKINNLMPGYEVAKYDLIWICDSGIRVIPDTLTDMVNQMTEKVGLVHGLPYVADRQGFAATLEQVYFGTSHPRYYISANVTGFKCVTGMSCLMRKDVLDQAGGLIAFAQYIAEDYFMAKAIADRGWRFAMSTQVAMQNSGSYSISQFQSRMIRWTKLRINMLPATIICEPISECFVASLIIGWAAHHVFRWDIMVFFMCHCLAWFIFDYIQLRGVQGGTLCFSKLDYAVAWFIRESMTIYIFLSALWDPTISWRTGRYRLRCGGTAEEILDV

SEQ ID NO: 265 - DNA, 2085 bp, Homo sapiens
gcatttcttccttctgcgtatgggacaggaccctttctggaatgggggtcttatgacctacaatcaaacaagaacatggacttcccgtgcctctggctagggctgttgctgcctttggtagctgcgctggatttcaactaccaccgccaggaagggatggaagcgtttttgaagactgttgcccaaaactacagttctgtcactcacttacacagtattgggaaatctgtgaaaggtagaaacctgtgggttcttgttgtggggcggtttccaaaggaacacagaattgggattccagagttcaaatacgtggcaaatatgcatggagatgagactgttgggcgggagctgctgctccatctgattgactatctcgtaaccagtgatggcaaagaccctgaaatcacaaatctgatcaatagtacccggatacacatcatgccttccatgaacccagatggatttgaagccgtcaaaaagcctgactgttactacagcatcggaagggaaaattataaccagtatgacttgaatcgaaatttccccgatgcttttgaatataataatgtctcaaggcagcctgaaactgtggcagtcatgaagtggctgaaaacagagacgtttgtcctctctgcaaacctccatggtggtgccctcgtggccagttacccatttgataatggtgttcaagcaactggggcattatactcccgaagcttaacgcctgatgatgatgtttttcaatatcttgcacatacctatgcttcaagaaatcccaacatgaagaaaggagacgagtgtaaaaacaaaatgaactttcctaatggtgttacaaatggatactcttggtatccactccaaggtggaatgcaagattacaactacatctgggcccagtgttttgaaattacgttggagctgtcatgctgtaaatatcctcgtgaggagaagcttccatccttttggaataataacaaagcctcattaattgaatatataaagcaggtgcacctaggtgtaaagggtcaagtttttgatcagaatggaaatccattacccaatgtaattgtggaagtccaagacagaaaacatatctgcccctatagaaccaacaaatatggagagtattatctccttctcttgcctgggtcttatattataaatgttacagtccctggacatgatccacacatcacaaaggtgattattccggagaaatcccagaacttcagtgctcttaaaaaggatattctacttccattccaagggcaattggattctatcccagtatcaaatccttcatgcccaatgattcctctatacagaaatttgccagaccactcagctgcaacaaagcctagtttgttcttatttttagtgagtcttttgcacatattcttcaaataaagtaaaatgtgaaactcaacccacatcaccacctggaatcagggattgctcactccaggttactgcaaccctaactcactctagtgggaccttgactggagaaactccacgatcttcctgaagaagagaaatggatgtttccaaattccacaataagcaatatgtggtgataatgaaaagaatgattcagtcttgacggtgaatggaagacacttacctaacaagtactgctcatttacactcaaattaatcttgaagtagtcttaaaatgtgtaagaagttaaaacttgagaagcaaaaaatgcctgcaaaaagaagatcattttgtatacagagaaccggatgaatataagcaatgaagatgaacatttattgatcttctacatacaagacttcaccataaggccaggagcagtgctcacgccttgtaatcccagcactttgggaggccaaggtgggcggatcaccttgaggtcaggagttcaagaccagcctgaccaacatggtgaaaccctgtctctactaaatattagcggggtgtggtggcgggcacctgtagtcgcagcctttcgggaggctgagacaggagaatcgcttgaaccctagaggcggagtttgcagtgagccgagatagtgccattgtactccagcttgggcaacagagtaagactctgtctc

SEQ ID NO: 266 - protein, 443 aa, Homo sapiens
MDFPCLWLGLLLPLVAALDFNYHRQEGMEAFLKTVAQNYSSVTHLHSIGKSVKGRNLWVLVVGRFPKEHRIGIPEFKYVANMHGDETVGRELLLHLIDYLVTSDGKDPEITNLINSTRIHIMPSMNPDGFEAVKKPDCYYSIGRENYNQYDLNRNFPDAFEYNNVSRQPETVAVMKWLKTETFVLSANLHGGALVASYPFDNGVQATGALYSRSLTPDDDVFQYLAHTYASRNPNMKKGDECKNKMNFPNGVTNGYSWYPLQGGMQDYNYIWAQCFEITLELSCCKYPREEKLPSFWNNNKASLIEYIKQVHLGVKGQVFDQNGNPLPNVIVEVQDRKHICPYRTNKYGEYYLLLLPGSYIINVTVPGHDPHITKVIIPEKSQNFSALKKDILLPFQGQLDSIPVSNPSCPMIPLYRNLPDHSAATKPSLFLFLVSLLHIFFK

SEQ ID NO: 267 - DNA, 873 bp, Homo sapiens
acttccccttcctgtacagggcaggttgtgcagctggaggcagagcagtcctctctggggagcctgaagcaaacatggatcaagaaactgtaggcaatgttgtcctgttggccatcgtcaccctcatcagcgtggtccagaatggattctttgcccataaagtggagcacgaaagcaggacccagaatgggaggagcttccagaggaccggaacacttgcctttgagcgggtctacactgccaaccagaactgtgtagatgcgtaccccactttcctcgctgtgctctggtctgcggggctactttgcagccaagttcctgctgcgtttgctggactgatgtacttgtttgtgaggcaaaagtactttgtcggttacctaggagagagaacgcagagcacccctggctacatatttgggaaacgcatcatactcttcctgttcctcatgtccgttgctggcatattcaactattacctcatcttctttttcggaagtgactttgaaaactacataaagacgatctccaccaccatctcccctctacttctcattccctaactctctgctgaatatggggttggtgttctcatctaatcaatacctacaagtcatcataattcagctcttgagagcattctgctcttctttagatggctgtaaatctattggccatctgggcttcacagcttgagttaaccttgcttttccgggaacaaaatgatgtcatgtcagctccgccccttgaacatgaccgtggccccaaatttgctattcccatgcattttgtttgtttcttcacttatcctgttctctgaagatgttttgtgaccaggtttgtgttttcttaaaataaaatgcagagacatgtttt

SEQ ID NO: 268 - protein, 161 aa, Homo sapiens
MDQETVGNVVLLAIVTLISVVQNGFFAHKVEHESRTQNGRSFQRTGTLAFERVYTANQNCVDAYPTFLAVLWSAGLLCSQVPAAFAGLMYLFVRQKYFVGYLGERTQSTPGYIFGKRIILFLFLMSVAGIFNYYLIFFFGSDFENYIKTISTTISPLLLIP

SEQ ID NO: 269 - DNA, 2298 bp, Homo sapiens
tcggccgagcccagagacagccagttcctctcccgccgcgccgggccgcgtgccgctcgctccccggccgtggcgcctccgggccagacgcgctgcagcctccagcccgcggcaagcgggcggggcggccgcgccacccccggccccgcgccagcagcccctcgccgcgcgtccagcgttcccggccagcagcctccccatacgcagtcctgctggaccgccccgtcgcgccccccactctgaactcaagtcaccgtggagctccgccgccccgaaactttcacgcgagcgggaaatatgggatgtataaaatcaaaagggaaagacagcttgagtgacgatggagtagatttgaagactcaaccagtacgtaatactgaaagaactatttatgtgagagatccaacgtccaataaacagcaaaggccagttccagaatctcagcttttacctggacagaggtttcaaactaaagatccagaggaacaaggagacattgtggtagccttgtacccctatgatggcatccacccggacgacttgtctttcaagaaaggagagaagatgaaagtcctggaggagcatggagaatggtggaaagcaaagtcccttttaacaaaaaaagaaggcttcatccccagcaactatgtggccaaactcaacaccttagaaacagaagagtggtttttcaaggatataaccaggaaggacgcagaaaggcagcttttggcaccaggaaatagcgctggagctttccttattagagaaagtgaaacattaaaaggaagcttctctctgtctgtcagagactttgaccctgtgcatggtgatgttattaagcactacaaaattagaagtctggataatgggggctattacatctctccacgaatcacttttccctgtatcagcgacatgattaaacattaccaaaagcaggcagatggcttgtgcagaagattggagaaggcttgtattagtcccaagccacagaagccatgggataaagatgcctgggagatcccccgggagtccatcaagttggtgaaaaggcttggcgctgggcagtttggggaagtctggatgggttactataacaacagtaccaaggtggctgtgaaaaccctgaagccaggaactatgtctgtgcaagccttcctggaagaagccaacctcatgaagaccctgcagcatgacaagctcgtgaggctctacgctgtggtcaccagggaggagcccatttacatcatcaccgagtacatggccaagggcagtttgctggatttcctgaagagcgatgaaggtggcaaagtgctgcttccaaagctcattgacttttctgctcagattgcagagggaatggcatacatcgagcggaagaactacattcaccgggacctgcgagcagctaatgttctggtctccgagtcactaatgtgcaaaattgcagattttggccttgctagagtaattgaagataatgagtacacagcaagggaaggtgctaagttccctattaagtggacggctccagaagcaatcaactttggatgtttcactattaagtctgatgtgtggtcctttggaatcctcctatacgaaattgtcacctatgggaaaattccctacccagggagaactaatgccgacgtgatgaccgccctgtcccagggctacaggatgccccgtgtggagaactgcccagatgagctctatgacattatgaaaatgtgctggaaagaaaaggcagaagagagaccaacgtttgactacttacagagcgtcctggatgatttctacacagccacggaagggcaataccagcagcagccttagagcacagggagacccgtccatttggcaggggtggctgcctcatttagagaggaaaagtaaccatcactggttgcacttatgatttcatgtgcggggatcatctgccgtgcctggatcctgaaatagaggctaaattactcaggaagaacaccctctaaatgggaaagtattctgtactcttagatggattctccactcagttgcaacttggacttgtcctcagcagctggtaatcttgctctgcttgacaacatctgagtgcagccgtttgagaagaaaacatctattctctccaaaaatgcacccaactagctctatgtttacaaatggacataggactcaaagtttcagagaccattgcaatgaatccccaataattgcagaactaaactcatttataaagctaaaataaccggatatatacatagcatgacatttctttgtgctttggcttacttgttt

SEQ ID NO: 270 - protein, 512 aa, Homo sapiens
MGCIKSKGKDSLSDDGVDLKTQPVRNTERTIYVRDPTSNKQQRPVPESQLLPGQRFQTKDPEEQGDIVVALYPYDGIHPDDLSFKKGEKMKVLEEHGEWWKAKSLLTKKEGFIPSNYVAKLNTLETEEWFFKDITRKDAERQLLAPGNSAGAFLIRESETLKGSFSLSVRDFDPVHGDVIKHYKIRSLDNGGYYISPRITFPCISDMIKHYQKQADGLCRRLEKACISPKPQKPWDKDAWEIPRESIKLVKRLGAGQFGEVWMGYYNNSTKVAVKTLKPGTMSVQAFLEEANLMKTLQHDKLVRLYAVVTREEPIYIITEYMAKGSLLDFLKSDEGGKVLLPKLIDFSAQIAEGMAYIERKNYIHRDLRAANVLVSESLMCKIADFGLARVIEDNEYTAREGAKFPIKWTAPEAINFGCFTIKSDVWSFGILLYEIVTYGKIPYPGRTNADVMTALSQGYRMPRVENCPDELYDIMKMCWKEKAEERPTFDYLQSVLDDFYTATEGQYQQQP

SEQ ID NO: 271 - DNA, 1432 bp, Homo sapiens
gctgttcggcctgcgtcgctccgggagctgccgacggacggagcgcccccgcccccgcccggccgcccgcccgccgccgccatgcccttctccaacagccacaacgcactgaagctgcgcttcccggccgaggacgagttccccgacctgagcgcccacaacaaccacatggccaaggtgctgacccccgagctgtacgcggagctgcgcgccaagagcacgccgagcggcttcacgctggacgacgtcatccagacaggcgtggacaacccgggccacccgtacatcatgaccgtgggctgcgtggcgggcgacgaggagtcctacgaagtgttcaaggatctcttcgaccccatcatcgaggaccggcacggcggctacaagcccagcgatgagcacaagaccgacctcaaccccgacaacctgcagggcggcgacgacctggaccccaactacgtgctgagctcgcgggtgcgcacgggccgcagcatccgtggcttctgcctccccccgcactgcagccgcggggagcgccgcgccatcgagaagctcgcggtggaagccctgtccagcctggacggcgacctggcgggccgatactacgcgctcaagagcatgacggaggcggagcagcagcagctcatcgacgaccacttcctcttcgacaagcccgtgtcgcccctgctgctggcctcgggcatggcccgcgactggcccgacgcccgcggtatctggcacaatgacaataagaccttcctggtgtgggtcaacgaggaggaccacctgcgggtcatctccatgcagaaggggggcaacatgaaggaggtgttcacccgcttctgcaccggcctcacccagattgaaactctcttcaagtctaaggactatgagttcatgtggaaccctcacctgggctacatcctcacctgcccatccaacctgggcaccgggctgcgggcaggtgtgcatatcaagctgcccaacctgggcaagcatgagaagttctcggaggtgcttaagcggctgcgacttcagaagcgaggcacaggcggtgtggacacggctgcggtgggcggggtcttcgacgtctccaacgctgaccgcctgggcttctcagaggtggagctggtgcagatggtggtggacggagtgaagctgctcatcgagatggagcagcggctggagcagggccaggccatcgacgacctcatgcctgcccagaaatgaagcccggcccacacccgacaccagccctgctgcttcctaacttattgcctgggcagtgcccaccatgcacccctgatgttcgccgtctggcgagcccttagccttgctgtagagacttccgtcacccttggtagagtttatttttttgatggctaagatactgctgatgctgaaataaactagggttttggcctgcctgcgtctg

SEQ ID NO: 272 - protein, 381 aa, Homo sapiens
MPFSNSHNALKLRFPAEDEFPDLSAHNNHMAKVLTPELYAELRAKSTPSGFTLDDVIQTGVDNPGHPYIMTVGCVAGDEESYEVFKDLFDPIIEDRHGGYKPSDEHKTDLNPDNLQGGDDLDPNYVLSSRVRTGRSIRGFCLPPHCSRGERRAIEKLAVEALSSLDGDLAGRYYALKSMTEAEQQQLIDDHFLFDKPVSPLLLASGMARDWPDARGIWHNDNKTFLVWVNEEDHLRVISMQKGGNMKEVFTRFCTGLTQIETLFKSKDYEFMWNPHLGYILTCPSNLGTGLRAGVHIKLPNLGKHEKFSEVLKRLRLQKRGTGGVDTAAVGGVFDVSNADRLGFSEVELVQMVVDGVKLLIEMEQRLEQGQAIDDLMPAQK

SEQ ID NO: 273 - DNA, 2808 bp, Homo sapiens
gcggcggcggcggcgcagtttgctcatactttgtgacttgcggtcacagtggcattcagctccacacttggtagaaccacaggcacgacaagcatagaaacatcctaaacaatcttcatcgaggcatcgaggtccatcccaataaaaatcaggagaccctggctatcatagaccttagtcttcgctggtatactcgctgtctgtcaaccagcggttgactttttttaagccttcttttttctcttttaccagtttctggagcaaattcagtttgccttcctggatttgtaaattgtaatgacctcaaaactttagcagttcttccatctgactcaggtttgcttctctggcggtcttcagaatcaacatccacacttccgtgattatctgcgtgcattttggacaaagcttccaaccaggatacgggaagaagaaatggctggtgatctttcagcaggtttcttcatggaggaacttaatacataccgtcagaagcagggagtagtacttaaatatcaagaactgcctaattcaggacctccacatgataggaggtttacatttcaagttataatagatggaagagaatttccagaaggtgaaggtagatcaaagaaggaagcaaaaaatgccgcagccaaattagctgttgagatacttaataaggaaaagaaggcagttagtcctttattattgacaacaacgaattcttcagaaggattatccatggggaattacataggccttatcaatagaattgcccagaagaaaagactaactgtaaattatgaacagtgtgcatcgggggtgcatgggccagaaggatttcattataaatgcaaaatgggacagaaagaatatagtattggtacaggttctactaaacaggaagcaaaacaattggccgctaaacttgcatatcttcagatattatcagaagaaacctcagtgaaatctgactacctgtcctctggttcttttgctactacgtgtgagtcccaaagcaactctttagtgaccagcacactcgcttctgaatcatcatctgaaggtgacttctcagcagatacatcagagataaattctaacagtgacagtttaaacagttcttcgttgcttatgaatggtctcagaaataatcaaaggaaggcaaaaagatctttggcacccagatttgaccttcctgacatgaaagaaacaaagtatactgtggacaagaggtttggcatggattttaaagaaatagaattaattggctcaggtggatttggccaagttttcaaagcaaaacacagaattgacggaaagacttacgttattaaacgtgttaaatataataacgagaaggcggagcgtgaagtaaaagcattggcaaaacttgatcatgtaaatattgttcactacaatggctgttgggatggatttgattatgatcctgagaccagtgatgattctcttgagagcagtgattatgatcctgagaacagcaaaaatagttcaaggtcaaagactaagtgccttttcatccaaatggaattctgtgataaagggaccttggaacaatggattgaaaaaagaagaggcgagaaactagacaaagttttggctttggaactctttgaacaaataacaaaaggggtggattatatacattcaaaaaaattaattcatagagatcttaagccaagtaatatattcttagtagatacaaaacaagtaaagattggagactttggacttgtaacatctctgaaaaatgatggaaagcgaacaaggagtaagggaactttgcgatacatgagcccagaacagatttcttcgcaagactatggaaaggaagtggacctctacgctttggggctaattcttgctgaacttcttcatgtatgtgacactgcttttgaaacatcaaagtttttcacagacctacgggatggcatcatctcagatatatttgataaaaaagaaaaaactcttctacagaaattactctcaaagaaacctgaggatcgacctaacacatctgaaatactaaggaccttgactgtgtggaagaaaagcccagagaaaaatgaacgacacacatgttagagcccttctgaaaaagtatcctgcttctgatatgcagttttccttaaattatctaaaatctgctagggaatatcaatagatatttaccttttattttaatgtttcctttaattttttactatttttactaatctttctgcagaaacagaaaggttttcttctttttgcttcaaaaacattcttacattttactttttcctggctcatctctttattcttttttttttttttaaagacagagtctcgctctgttgcccaggctggagtgcaatgacacagtcttggctcactgcaacttctgcctcttgggttcaagtgattctcctgcctcagcctcctgagtagctggattacaggcatgtgccacccacccaactaatttttgtgtttttaataaagacagggtttcaccatgttggccaggctggtctcaaactcctgacctcaagtaatccacctgcctcggcctcccaaagtgctgggattacagggatgagccaccgcgcccagcctcatctctttgttctaaagatggaaaaaccacccccaaattttctttttatactattaatgaatcaatcaattcatatctatttattaaatttctaccgcttttaggccaaaaaaatgtaagatcgttctctgcctcacatagcttacaagccagctggagaaatatggtactcattaaaaaaaaaaaaaaagtgatgtacaacc

SEQ ID NO: 274 - protein, 551 aa, Homo sapiens
MAGDLSAGFFMEELNTYRQKQGVVLKYQELPNSGPPHDRRFTFQVIIDGREFPEGEGRSKKEAKNAAAKLAVEILNKEKKAVSPLLLTTTNSSEGLSMGNYIGLINRIAQKKRLTVNYEQCASGVHGPEGFHYKCKMGQKEYSIGTGSTKQEAKQLAAKLAYLQILSEETSVKSDYLSSGSFATTCESQSNSLVTSTLASESSSEGDFSADTSEINSNSDSLNSSSLLMNGLRNNQRKAKRSLAPRFDLPDMKETKYTVDKRFGMDFKEIELIGSGGFGQVFKAKHRIDGKTYVIKRVKYNNEKAEREVKALAKLDHVNIVHYNGCWDGFDYDPETSDDSLESSDYDPENSKNSSRSKTKCLFIQMEFCDKGTLEQWIEKRRGEKLDKVLALELFEQITKGVDYIHSKKLIHRDLKPSNIFLVDTKQVKIGDFGLVTSLKNDGKRTRSKGTLRYMSPEQISSQDYGKEVDLYALGLILAELLHVCDTAFETSKFFTDLRDGIISDIFDKKEKTLLQKLLSKKPEDRPNTSEILRTLTVWKKSPEKNERHTC

SEQ ID NO: 275 - DNA, 1924 bp, Homo sapiens
cgcccgggcaggttagaattcagcgaccgcttaattctaggctcagtcccgacgtggaactcagcagcggaggctggacgcttgcatggcgcttgagagattccatcgtgcctggctcacataagcgcttcctggaagtgaagtcgtgctgtcctgaacgcgggccaggcagctgcggcctgggggttttggagtgatcacgaatgagcaaggcgtttgggctcctgaggcaaatctgtcagtccatcctggctgagtcctcgcagtccccggcagatcttgaagaaaagaaggaagaagacagcaacatgaagagagagcagcccagagagcgtcccagggcctgggactaccctcatggcctggttggtttacacaacattggacagacctgctgccttaactccttgattcaggtgttcgtaatgaatgtggacttcaccaggatattgaagaggatcacggtgcccaggggagctgacgagcagaggagaagcgtccctttccagatgcttctgctgctggagaagatgcaggacagccggcagaaagcagtgcggcccctggagctggcctactgcctgcagaagtgcaacgtgcccttgtttgtccaacatgatgctgcccaactgtacctcaaactctggaacctgattaaggaccagatcactgatgtgcacttggtggagagactgcaggccctgtatacgatccgggtgaaggactccttgatttgcgttgactgtgccatggagagtagcagaaacagcagcatgctcaccctcccactttctctttttgatgtggactcaaagcccctgaagacactggaggacgccctgcactgcttcttccagcccagggagttatcaagcaaaagcaagtgcttctgtgagaactgtgggaagaagacccgtgggaaacaggtcttgaagctgacccatttgccccagaccctgacaatccacctcatgcgattctccatcaggaattcacagacgagaaagatctgccactccctgtacttcccccagagcttggatttcagccagatccttccaatgaagcgagagtcttgtgatgctgaggagcagtctggagggcagtatgagctttttgctgtgattgcgcacgtgggaatggcagactccggtcattactgtgtctacatccggaatgctgtggatggaaaatggtcttgcttcaatgactccaatatttgcttggtgtcctgggaagacatccagtgtacctacggaaatcctaactaccactggcaggaaactgcatatcttctggtttacatgaagatggagtgctaatggaaatgcccaaaaccttcagagattgacacgctgtcattttccatttccgttcctggatctacggagtcttctaagagattttgcaatgaggagaagcattgttttcaaactatataactgaccttatttataattagggatattatcaaaatatgtaaccatgaggcccctcaggtcctgatcagtcagaatggatgctttcaccagcagacccggccatgtggctgctcggtcctgggtgctcgctgctgtgcaagacattagccctttagttatgagcctgtgggaacttcaggggttcccagtggggagagcagtggcagtgggaggcatctgggggccaaaggtcagtggcagggggtatttcagtattatacaactgctgtgaccagacttgtatactggctgaatatcagtgctgtttgtaatttttcactttgagaaccaacattaattccatatgaatcaagtgttttgtaactgctattcatttattcagcaaatatttattgagcatctcttctccataagatagtgtgataaacacggtcatgaataaagttattttccccgaaaaaaaaaaaaaaaaaaaaaaaaaa

SEQ ID NO: 276 - protein, 372 aa, Homo sapiens
MSKAFGLLRQICQSILAESSQSPADLEEKKEEDSNMKREQPRERPRAWDYPHGLVGLHNIGQTCCLNSLIQVFVMNVDFTRILKRITVPRGADEQRRSVPFQMLLLLEKMQDSRQKAVRPLELAYCLQKCNVPLFVQHDAAQLYLKLWNLIKDQITDVHLVERLQALYTIRVKDSLICVDCAMESSRNSSMLTLPLSLFDVDSKPLKTLEDALHCFFQPRELSSKSKCFCENCGKKTRGKQVLKLTHLPQTLTIHLMRFSIRNSQTRKICHSLYFPQSLDFSQILPMKRESCDAEEQSGGQYELFAVIAHVGMADSGHYCVYIRNAVDGKWSCFNDSNICLVSWEDIQCTYGNPNYHWQETAYLLVYMKMEC

SEQ ID NO: 277 - DNA, 1505 bp, Homo sapiens
gctggtcggaggctcgcagtgctgtcggcgagaagcagtcgggtttggagcgcttgggtcgcgttggtgcgcggtggaacgcgcccagggaccccagttcccgcgagcagctccgcgccgcgcctgagagactaagctgaaactgctgctcagctcccaagatggtgccacccaaattgcatgtgcttttctgcctctgcggctgcctggctgtggtttatccttttgactggcaatacataaatcctgttgcccatatgaaatcatcagcatgggtcaacaaaatacaagtactgatggctgctgcaagctttggccaaactaaaatcccccggggaaatgggccttattccgttggttgtacagacttaatgtttgatcacactaataagggcaccttcttgcgtttatattatccatcccaagataatgatcgccttgacaccctttggatcccaaataaagaatatttttggggtcttagcaaatttcttggaacacactggcttatgggcaacattttgaggttactctttggttcaatgacaactcctgcaaactggaattcccctctgaggcctggtgaaaaatatccacttgttgttttttctcatggtcttggggcattcaggacactttattctgctattggcattgacctggcatctcatgggtttatagttgctgctgtagaacacagagatagatctgcatctgcaacttactatttcaaggaccaatctgctgcagaaataggggacaagtcttggctctaccttagaaccctgaaacaagaggaggagacacatatacgaaatgagcaggtacggcaaagagcaaaagaatgttcccaagctctcagtctgattcttgacattgatcatggaaagccagtgaagaatgcattagatttaaagtttgatatggaacaactgaaggactctattgatagggaaaaaatagcagtaattggacattcttttggtggagcaacggttattcagactcttagtgaagatcagagattcagatgtggtattgccctggatgcatggatgtttccactgggtgatgaagtatattccagaattcctcagcccctcttttttatcaactctgaatatttccaatatcctgctaatatcataaaaatgaaaaaatgctactcacctgataaagaaagaaagatgattacaatcaggggttcagtccaccagaattttgctgacttcacttttgcaactggcaaaataattggacacatgctcaaattaaagggagacatagattcaaatgtagctattgatcttagcaacaaagcttcattagcattcttacaaaagcatttaggacttcataaagattttgatcagtgggactgcttgattgaaggagatgatgagaatcttattccagggaccaacattaacacaaccaatcaacacatcatgttacagaactcttcaggaatagagaaatacaattaggattaaaataggtttttt

SEQ ID NO: 278 - protein, 441 aa, Homo sapiens
MVPPKLHVLFCLCGCLAVVYPFDWQYINPVAHMKSSAWVNKIQVLMAAASFGQTKIPRGNGPYSVGCTDLMFDHTNKGTFLRLYYPSQDNDRLDTLWIPNKEYFWGLSKFLGTHWLMGNILRLLFGSMTTPANWNSPLRPGEKYPLVVFSHGLGAFRTLYSAIGIDLASHGFIVAAVEHRDRSASATYYFKDQSAAEIGDKSWLYLRTLKQEEETHIRNEQVRQRAKECSQALSLILDIDHGKPVKNALDLKFDMEQLKDSIDREKIAVIGHSFGGATVIQTLSEDQRFRCGIALDAWMFPLGDEVYSRIPQPLFFINSEYFQYPANIIKMKKCYSPDKERKMITIRGSVHQNFADFTFATGKIIGHMLKLKGDIDSNVAIDLSNKASLAFLQKHLGLHKDFDQWDCLIEGDDENLIPGTNINTTNQHIMLQNSSGIEKYN

SEQ ID NO: 279 - DNA, 2147 bp, Homo sapiens
ggctcttttaaatgaccccaggcgtcgtgtattgaatcctagactcacgtccgtctcgccggcgcccgagccagtccgcgcgcaccgcgtctgcgtccccgaaagccccgcccgcaagggctgccctgcctacctggtctccgacgtgctcgtctggagggcggtgcgaggggccgagccgacgagatgttcttgctgcctcttccggctgcggggcgagtagtcgtccgacgtctggccgtagtacgttctgggagccggagtctctccaccgcagacatgacgaagggccttgttttaggaatctattccaaagaaaaagaagatgatgtgccacagttcacaagtgcaggagagaattttgataaattgttagctggaaagctgagagagactttgaacatatctggaccacctctgaaggcagggaagactcgaaccttttatggtctgcatcaggacttccccagcgtggtgctagttggcctcggcaaaaaggcagctggaatcgacgaacaggaaaactggcatgaaggcaaagaaaacatcagagctgctgttgcagcggggtgcaggcagattcaagacctggagctctcgtctgtggaggtggatccctgtggagacgctcaggctgctgcggagggagcggtgcttggtctctatgaatacgatgacctaaagcaaaaaaagaagatggctgtgtcggcaaagctctatggaagtggggatcaggaggcctggcagaaaggagtcctgtttgcttctgggcagaacttggcacgccaattgatggagacgccagccaatgagatgacgccaaccagatttgccgaaattattgagaagaatctcaaaagtgctagtagtaaaaccgaggtccatatcagacccaagtcttggattgaggaacaggcaatgggatcattcctcagtgtggccaaaggatctgacgagcccccagtcttcttggaaattcactacaaaggcagccccaatgcaaacgaaccacccctggtgtttgttgggaaaggaattacctttgacagtggtggtatctccatcaaggcttctgcaaatatggacctcatgagggctgacatgggaggagctgcaactatatgctcagccatcgtgtctgctgcaaagttaaatttgcccattaatattataggtctggcccctctttgtgaaaatatgcccagcggcaaggccaacaagccgggggatgttgttagagccaaaaacgggaagaccatccaggttgataacactgatgctgaggggaggctcatactggctgatgcgctctgttacgcacacacgtttaacccgaaggtcatcctcaatgccgccaccttaacaggtgccatggatgtagctttgggatcaggtgccactggggtctttaccaattcatcctggctctggaacaaactcttcgaggccagcattgaaacaggggaccgtgtctggaggatgcctctcttcgaacattatacaagacaggttgtagattgccagcttgctgatgttaacaacattggaaaatacagatctgcaggagcatgtacagctgcagcattcctgaaagaattcgtaactcatcctaagtgggcacatttagacatagcaggcgtgatgaccaacaaagatgaagttccctatctacggaaaggcatgactgggaggcccacaaggactctcattgagttcttacttcgtttcagtcaagacaatgcttagttcagatactcaaaaatgtcttcactctgtcttaaattggacagttgaacttaaaaggtttttgaataaatggatgaaaatcttttaacggagacaaaggatggtatttaaaaatgtagaacacaatgaaatttgtatgccttgatttttttttcatttcacacaaagatttataaaggtaaagttaatatcttacttgataaggatttttaagatactctataaatgattaaaatttttagaacttcctaatcacttttcagagtatatgtttttcattgagaagcaaaattgtaactcagatttgtgatgctaggaacatgagcaaactgaaaattactatgcacttgtcagaaacaataaatgcaacttgttgtgaaaaaaaaaaaaaaaaaaaaaaa

SEQ ID NO: 280 - protein, 519 aa, Homo sapiens
MFLLPLPAAGRVVVRRLAVVRSGSRSLSTADMTKGLVLGIYSKEKEDDVPQFTSAGENFDKLLAGKLRETLNISGPPLKAGKTRTFYGLHQDFPSVVLVGLGKKAAGIDEQENWHEGKENIRAAVAAGCRQIQDLELSSVEVDPCGDAQAAAEGAVLGLYEYDDLKQKKKMAVSAKLYGSGDQEAWQKGVLFASGQNLARQLMETPANEMTPTRFAEIIEKNLKSASSKTEVHIRPKSWIEEQAMGSFLSVAKGSDEPPVFLEIHYKGSPNANEPPLVFVGKGITFDSGGISIKASANMDLMRADMGGAATICSAIVSAAKLNLPINIIGLAPLCENMPSGKANKPGDVVRAKNGKTIQVDNTDAEGRLILADALCYAHTFNPKVILNAATLTGAMDVALGSGATGVFTNSSWLWNKLFEASIETGDRVWRMPLFEHYTRQVVDCQLADVNNIGKYRSAGACTAAAFLKEFVTHPKWAHLDIAGVMTNKDEVPYLRKGMTGRPTRTLIEFLLRFSQDNA

SEQ ID NO: 281 - DNA, 1680 bp, Homo sapiens
ataaaaactcagagaaatcagtgtgtaggagacacagaaatcagtgtcactcagtgacagaagcaacaataattgtgaaaaatacttcagcagttatggactcatctgtcattcaaaggaaaaaagtagctgtcattggtggtggcttggttggctcattacaagcatgctttcttgcaaagaggaatttccagattgatgtatatgaagctagggaagatactcgagtggctaccttcacacgtggaagaagcattaacttagccctttctcatagaggacgacaagccttgaaagctgttggcctggaagatcagattgtatcccaaggtattcccatgagagcaagaatgatccactctctttcaggaaaaaagtctgcaattccctatgggacaaagtctcagtatattctttctgtaagcagagaaaatctaaacaaggatctattgactgctgctgagaaataccccaatgtgaaaatgcactttaaccacaggctgttgaaatgtaatccagaggaaggaatgatcacagtgcttggatctgacaaagttcccaaagatgtcacttgtgacctcattgtaggatgtgatggagcctattcaactgtcagatctcacctgatgaagaaacctcgctttgattacagtcagcagtacattcctcatgggtacatggagttgactattccacctaagaacggagattatgccatggaacctaattatctgcatatttggcctagaaatacctttatgatgattgcacttcctaacatgaacaaatcattcacatgtactttgttcatgccctttgaagagtttgaaaaacttctaaccagtaatgatgtggtagatttcttccagaaatactttccggatgccatccctctaattggagagaaactcctagtgcaagatttcttcctgttgcctgcccagcccatgatatctgtaaagtgctcttcatttcactttaaatctcactgtgtactgctgggagatgcagctcatgctatagtgccgttttttgggcaaggaatgaatgcgggctttgaagactgcttggtatttgatgagttaatggataaattcagtaacgaccttagtttgtgtcttcctgtgttctcaagattgagaatcccagatgatcacgcgatttcagacctatccatgtacaattacatagagaagaacatggagagatttcttcatgcgattatgccatcgacctttatccctctctatacaatggtcactttttccagaataagataccatgaggctgtgcagcgttggcattggcaaaaaaggtgataaacaaaggactctttttcttgggatcactgatagccatcagcagtacctacctacttatacactacatgtcaccacgatctttcctctgcttgagaagaccatggaactggatagctcacttccggaatacaacatgtttccccgcaaaggccgtggactccctagaacaaatttccaatctcattagcaggtgatagaaaggttttgtggtagcaaatgcatgatttctctgtgaccaaaattaagcatgaaaaaaatgtttccattgccatatttgattcactagtggaagatagtgttctgcttataattaaactgaatgtagagttaaaaaaaaaaaaaaaaaaaaaaaaaaaaa

SEQ ID NO: 282 - protein, 407 aa, Homo sapiens [sequence omitted]

SEQ ID NO: 283 - DNA, 2393 bp, Homo sapiens
cgaggaacgagtgacagccggacagtccgccgggcggtgatccggggccgctcccgggcgcgccctcggctccaggtcctacccggagccgctgccatgggagagccagccttgggcgctggggaccagccgccgcgcccgcctcggagtcgcggcccgagtcccggcgccagcagccagcccgctgcgtccccttcccgggctgcagggctgcctccgccgcgccgccggcccggattgtgcctgtgatgagccgcagcccgcagcgagctctgcccccgggcgcgctccctcggctgctccaggctgcgcctgcagcgcagccgcgtgccctgctcccgcagtggccccggcgcccaggacgccgctggcccgcgtcccctctcggaatgaaggtgttccgtaggaaggcgctggtgttgtgcgcgggctatgcactgctgctggtgctcactatgctcaacctcctggactacaagtggcacaaggagccgctgcagcagtgcaaccccgatgggccgctgggtgccgcagcgggggcagccggaggcaagctgggggcgcccagggccgcctccggccgggccgccccgtgctcatgcccgtttggacctccgcactccttaccgccctcccgctgccgccgtcggggcgatactctgcagccgcggcagggatggcgggggttgcggcccctccaggcaatggcactcggggcaccggagggcgtcggggacaagcggcactggatgtacgtgttcaccacgtggcgctctggctcgtcgttcttcggcgagctattcaaccagaatcccgaggtgttctttctctacgagccagtgtggcatgtatggcaaaaactgtatccgggggacgccgtttccctgcagggggcagcgcgggacatgctgagcgctctttaccgctgcgacctctctgtcttccagttgtatagccccgcgggcagcggggggcgcaacctcaccacgctgggcatcttcggcgcagccaccaacaaggtggtgtgctcgtcaccactctgccccgcctaccgcaaggaggtcgtggggttggtggacgaccgcgtgtgcaagaagtgcccgccacagcgcctggcgcgtttcgaggaggagtgccgcaagtaccgcacactagtcataaagggtgtgcgcgtcttcgacgtggcggtcttggcgccactgctgcgagacccggccctggacctcaaggtcatccacttggtgcgtgatccccgcgcggtggcgagttcacggatccgctcgcgccacggcctcatccgtgagagcctacaggtggtgcgcagccgagacccgcgagctcaccgcatgcccttcttggaggccgcgggccacaagcttggcgccaagaaggagggcgtgggcggccccgcagactaccacgctctgggcgctatggaggtcatctgcaatagtatggctaagacgctgcagacagccctgcagccccctgactggctgcagggccactacctggtggtgcggtacgaggacctggtgggagaccccgtcaagacactacggagagtgtacgattttgtgggactgttggtgagccccgaaatggagcagtttgccctgaacatgaccagtggctcgggctcctcctccaagcctttcgtggtatctgcacgcaatgccacgcaggccgccaatgcctggcggaccgccctcaccttccagcagatcaaacaggtggaggagttttgctaccagcccatggccgtcctgggctatgagcgggtcaacagccctgaggaggtcaaagacctcagcaagaccctgcttcggaagccccgtctctaaaaggggttcccaggagacctgattccctgtggtgatacctataaagaggatcgtagtgtgtttaaataaacacagtccagactcaaacggaggaagcccacatattctattatagatatataaataatcacacacacacttgctgtcaatgttttgagtcagtgcatttcaaggaacagccacaaaatacacacccctaagaaaaggcaagacttgaacgttctgaccaggtgcccctcttcttctttgccttctcttgtcctctttctcctatttcttaccctgtcctccacctgccttccattttgaagtgggatgttaatgaaatcaagttccagtaacccaaatcttgtttacaaaatattcgtggtatctgtgaacatgttaagagtaatttggatgtgggggtgggggtggagaaaggggaagtggtccagaaacaaaaagccccattgggcatgataagccgaggaggcattcttcctaaaagtagacttttgtgtaaaaagcaaaggttacatgtgagtattaataaagaagataataaat

SEQ ID NO: 284 - protein, 531 aa, Homo sapiens
MSRSPQRALPPGALPRLLQAAPAAQPRALLPQWPRRPGRRWPASPLGMKVFRRKALVLCAGYALLLVLTMLNLLDYKWHKEPLQQCNPDGPLGAAAGAAGGKLGAPRAASGRAAPCSCPFGPPHSLPPSRCRRRGDTLQPRQGWRGLRPLQAMALGAPEGVGDKRHWMYVFTTWRSGSSFFGELFNQNPEVFFLYEPVWHVWQKLYPGDAVSLQGAARDMLSALYRCDLSVFQLYSPAGSGGRNLTTLGIFGAATNKVVCSSPLCPAYRKEVVGLVDDRVCKKCPPQRLARFEEECRKYRTLVIKGVRVFDVAVLAPLLRDPALDLKVIHLVRDPRAVASSRIRSRHGLIRESLQVVRSRDPRAHRMPFLEAAGHKLGAKKEGVGGPADYHALGAMEVICNSMAKTLQTALQPPDWLQGHYLVVRYEDLVGDPVKTLRRVYDFVGLLVSPEMEQFALNMTSGSGSSSKPFVVSARNATQAANAWRTALTFQQIKQVEEFCYQPMAVLGYERVNSPEEVKDLSKTLLRKPRL

SEQ ID NO: 285 - DNA, 4266 bp, Homo sapiens
cttcctctgccaccatggggaactgggctgtgaatgaggggctctccatttttgtcattctggtttggctggggttgaacgtcttcctctttgtctggtattaccgggtttatgatattccacctaagttcttttacacaagaaaacttcttgggtcagcactggcactggccagggcccctgcagcctgcctgaatttcaactgcatgctgattctcttgccagtctgtcgaaatctgctgtccttcctcaggggttccagtgcgtgctgctcaacaagagttcgaagacaactggacaggaatctcacctttcataaaatggtggcatggatgattgcacttcactctgcgattcacaccattgcacatctatttaatgtggaatggtgtgtgaatgcccgagtcaataattctgatccttattcagtagcactctctgaacttggagacaggcaaaatgaaagttatctcaattttgctcgaaagagaataaagaaccctgaaggaggcctgtacctggctgtgaccctgttggcaggcatcactggagttgtcatcacgctgtgcctcatattaattatcacttcctccaccaaaaccatccggaggtcttactttgaagtcttttggtacacacatcatctctttgtgatcttcttcattggccttgccatccatggagctgaacgaattgtacgtgggcagaccgcagagagtttggctgtgcataatataacagtttgtgaacaaaaaatctcagaatggggaaaaataaaggaatgcccaatccctcagtttgctggaaaccctcctatgacttggaaatggatagtgggtcccatgtttctgtatctctgtgagaggttggtgcggttttggcgatctcaacagaaggtggtcatcaccaaggtggtcactcaccctttcaaaaccatcgagctacagatgaagaagaaggggttcaaaatggaagtgggacaatacatttttgtcaagtgcccaaaggtgtccaagctggagtggcacccttttacactgacatccgcccctgaggaagacttctttagtatccatatccgcatcgttggggactggacagaggggctgttcaatgcttgtggctgtgataagcaggagtttcaagatgcgtggaaactacctaagatagcggttgatgggccctttggcactgccagtgaagatgtgttcagctatgaggtggtgatgttagtgggagcagggattggggtcacacccttcgcatccattctcaagtcagtctggtacaaatattgcaataacgccaccaatctgaagctcaaaaagatctacttctactggctgtgccgggacacacatgcctttgagtggtttgcagatctgctgcaactgctggagagccagatgcaggaaaggaacaatgccggcttcctcagctacaacatctacctcactggctgggatgagtctcaggccaatcactttgctgtgcaccatgatgaggagaaagatgtgatcacaggcctgaaacaaaagactttgtatggacggcccaactgggataatgaattcaagacaattgcaagtcaacaccctaataccagaataggagttttcctctgtggacctgaagccttggctgaaaccctgagtaaacaaagcatctccaactctgagtctggccctcggggagtgcatttcattttcaacaaggaaaacttctaacttgtctcttccatgaggaaataaatgtgggttgtgctgccaaatgctcaaataatgctaattgataatataaataccccctgcttaaaaatggacaaaaagaaactataatgtaatggttttcccttaaaggaatgtcaaagattgtttgatagtgataagttacatttatgtggagctctatggttttgagagcacttttacaaacattatttcatttttttcctctcagtaatgtcagtggaagttagggaaaagattcttggactcaattttagaatcaaaagggaaaggatcaaaaggttcagtaacttccctaagattatgaaactgtgaccagatctagcccatcttactccaggtttgatactctttccacaatactgagctgcctcagaatcctcaaaatcagtttttatattccccaaaagaagaaggaaaccaaggagtagctatatatttctactttgtgtcatttttgccatcattattatcatactgaaggaaattttccagatcattaggacataatacatgttgagagtgtctcaacacttattagtgacagtattgacatctgagcatactccagtttactaatacagcagggtaactgggccagatgttctttctacagaagaatattggattgattggagttaatgtaatactcatcatttaccactgtgcttggcagagagcggatactcaagtaagttttgttaaatgaatgaatgaatttagaaccacacaatgccaagatagaattaatttaaagccttaaacaaaatttatctaaagaaataacttctattactgtcatagaccaaaggaatctgattctccctagggtcaagaacaggctaaggatactaaccaataggattgcctgaagggttctgcacattcttatttgaagcatgaaaaaagagggttggaggtggagaattaacctcctgccatgactctggctcatctagtcctgctccttgtgctataaaataaatgcagactaatttcctgcccaaagtggtcttctccagctagcccttatgaatattgaacttaggaattgtgacaaatatgtatctgatatggtcatttgttttaaataacacccaccccttattttccgtaaatacacacacaaaatggatcgcatctgtgtgactaatggtttatttgtattatatcatcatcatcatcctaaaattaacaacccagaaacaaaaatctctatacagagatcaaattcacactcaatagtatgttctgaatatatgttcaagagagagtctctaaatcactgttagtgtggccaagagcagggttttctttttgttcttagaactgctcccatttctgggaactaaaaccagttttatttgccccaccccttggagccacaaatgtttagaactcttcaacttcggtaatgaggaagaaggagaaagagctgggggaagggcagaagactggtttaggaggaaaaggaaataaggagaaaagagaatgggagagtgagagaaaataaaaaaggcaaaagggagagagaggggaagggggtctcatattggtcattccctgccccagatttcttaaagtttgatatgtatagaatataattgaaggaggtatacacatactgatgttgttttgattatctatggtattgaatcttttaaaatctggtcacaaattttgatgctgagggggattattcaagggactaggatgaactaaataagaactcagttgttctttgtcatactactattcctttcgtctcccagaatcctcagggcactgagggtaggtctgacaaataaggcctgctgtgcgaatatagcctttctgaaatgtaccaggatggtttctgcttagagacacttaggtccagcctgttcacactgcacctcaggtatcaattcatctattcaacagatatttattgtgttattactatgagtcaggctctgtttattgtttcaattctttacaccaaagtatgaactggagagggtacctcagttataaggagtctgagaatattggccctttctaacctatgtgcataattaaaaccagcttcatttgttgctccgagagtgtttctccaaggttttctatcttcaaaaccaactaagttatgaaagtagagagatctgccctgtgttatccagttatgagataaaaaatgaatataagagtgcttgtcattataaaagtttcctttttatctctcaagccaccagctgccagccaccacgagccagctgccagcctagctttttttttttttttttttttagcacttagtatttagcatttattaacaggtactctaagaatgatgaagcattgtttttaatcttaagactatgaaggtttttcttagttcttctgcttttgcaattgtgtttgtgaaatttgaatacttgcaggctttgtatgtgaataattctagcgggggacctgggagataattctacggggaattcttaaaactgtgctcaactattaaaatgaatgagctttc

SEQ ID NO: 286 - protein, 570 aa, Homo sapiens
MGNWAVNEGLSIFVILVWLGLNVFLFVWYYRVYDIPPKFFYTRKLLGSALALARAPAACLNFNCMLILLPVCRNLLSFLRGSSACCSTRVRRQLDRNLTFHKMVAWMIALHSAIHTIAHLFNVEWCVNARVNNSDPYSVALSELGDRQNESYLNFARKRIKNPEGGLYLAVTLLAGITGVVITLCLILIITSSTKTIRRSYFEVFWYTHHLFVIFFIGLAIHGAERIVRGQTAESLAVHNITVCEQKISEWGKIKECPIPQFAGNPPMTWKWIVGPMFLYLCERLVRFWRSQQKVVITKVVTHPFKTIELQMKKKGFKMEVGQYIFVKCPKVSKLEWHPFTLTSAPEEDFFSIHIRIVGDWTEGLFNACGCDKQEFQDAWKLPKIAVDGPFGTASEDVFSYEVVMLVGAGIGVTPFASILKSVWYKYCNNATNLKLKKIYFYWLCRDTHAFEWFADLLQLLESQMQERNNAGFLSYNIYLTGWDESQANHFAVHHDEEKDVITGLKQKTLYGRPNWDNEFKTIASQHPNTRIGVFLCGPEALAETLSKQSISNSESGPRGVHFIFNKENF

SEQ ID NO: 287 - DNA, 1573 bp, Homo sapiens
ggctgggagagatggcaggcggaagacaccggcgcgtcgtgggcaccctccacctgctgctgctggtggccgccctgccctgggcatccaggggggtcagtccgagtgcctcagcctggccagaggagaagaattaccaccagccagccattttgaattcatcggctcttcggcaaattgcagaaggcaccagtatctctgaaatgtggcaaaatgacttacagccattgctgatagagcgatacccgggatcccctggaagctatgctgctcgtcagcacatcatgcagcgaattcagaggcttcaggctgactgggtcttggaaatagacaccttcttgagtcagacaccctatgggtaccggtctttctcaaatatcatcagcaccctcaatcccactgctaaacgacatttggtcctcgcctgccactatgactccaagtatttttcccactggaacaacagagtgtttgtaggagccactgattcagccgtgccatgtgcaatgatgttggaacttgctcgtgccttagacaagaaactcctttccttaaagactgtttcagactccaagccagatttgtcactccagctgatcttctttgatggtgaagaggcttttcttcactggtctcctcaagattctctctatgggtctcgacacttagctgcaaagatggcatcgaccccgcacccacctggagcgagaggcaccagccaactgcatggcatggatttattggtcttattggatttgattggagctccaaacccaacgtttcccaatttttttccaaactcagccaggtggttcgaaagacttcaagcaattgaacatgaacttcatgaattgggtttgctcaaggatcactctttggaggggcggtatttccagaattacagttatggaggtgtgattcaggatgaccatattccatttttaagaagaggtgttccagttctgcatctgataccgtctcctttccctgaagtctggcacaccatggatgacaatgaagaaaatttggatgaatcaaccattgacaatctaaacaaaatcctacaagtctttgtgttggaatatcttcatttgtaatactctgatttagtttaggataattggttctagaattgaattcaaaagtcaaggcatcatttaaaataatctgatttcagacaaatgctgtgtggaaacatctatcctatagatcatcctattcttatgtgtctttggttatcagatcaattacagaataattgtgttgtgatattgtgtcctaaattgctcattaatttttatttacagattgaaaaagaggcaccgtgtaaagaaaatggcaaaataaatatctttccaaggatcatcatcacgatagctaaacagtacttaaatagcggttggaactaggtagcctttcgaattttatgattttttcatatgtggaaatctattacatgtaatacaaaacaaacatgtagtttgaaggcggtcagatttctttgagaaatctttgtagagttaattttatggaaattaaaatcagaattaaatgctaaaaaaaaaaaaaaaaa

SEQ ID NO: 288 - protein, 361 aa, Homo sapiens
MAGGRHRRVVGTLHLLLLVAALPWASRGVSPSASAWPEEKNYHQPAILNSSALRQIAEGTSISEMWQNDLQPLLIERYPGSPGSYAARQHIMQRIQRLQADWVLEIDTFLSQTPYGYRSFSNIISTLNPTAKRHLVLACHYDSKYFSHWNNRVFVGATDSAVPCAMMLELARALDKKLLSLKTVSDSKPDLSLQLIFFDGEEAFLHWSPQDSLYGSRHLAAKMASTPHPPGARGTSQLHGMDLLVLLDLIGAPNPTFPNFFPNSARWFERLQAIEHELHELGLLKDHSLEGRYFQNYSYGGVIQDDHIPFLRRGVPVLHLIPSPFPEVWHTMDDNEENLDESTIDNLNKILQVFVLEYLHL

SEQ ID NO: 289 - DNA, 3186 bp, Homo sapiens
gcggccgcggcggtgcagcagaggcgcctcgggcaggaggagggcggcttctgcgagggcagcctgaggtattaaaaagtgtcagcaaactgcattgaataacagacatcctaagaggggatattttccacctctataatgaagaaaagcaggagtgtgatgacggtgatggctgatgataatgttaaagattattttgaatgtagcttgagtaaatcctacagttcttccagtaacacacttgggatcgacctctggagagggagaaggtgttgctcaggaaacttacagttaccaccactgtctcaaagacagagtgaaagggcaaggactcctgagggagatggtatttccaggccgaccacactgcctttgacaacgcttccaagcattgctattacaactgtaagccaggagtgctttgatgtggaaaatggcccttccccaggtcggagtccactggatccccaggccagctcttccgctgggctggtacttcacgccacctttcctgggcacagccagcgcagagagtcatttctctacagatcagacagcgactatgacttgtcaccaaaggcgatgtcgagaaactcttctcttccaagcgagcaacacggcgatgacttgattgtaactccttttgcccaggtccttgccagcttgcgaagtgtgagaaacaacttcactatactgacaaaccttcatggtacatctaacaagaggtccccagctgctagtcagcctcctgtctccagagtcaacccacaagaagaatcttatcaaaaattagcaatggaaacgctggaggaattagactggtgtttagaccagctagagaccatacagacctaccggtctgtcagtgagatggcttctaacaagttcaaaagaatgctgaaccgggagctgacacacctctcagagatgagccgatcagggaaccaggtgtctgaatacatttcaaatactttcttagacaagcagaatgatgtggagatcccatctcctacccagaaagacagggagaaaaagaaaaagcagcagctcatgacccagataagtggagtgaagaaattaatgcatagttcaagcctaaacaatacaagcatctcacgctttggagtcaacactgaaaatgaagatcacctggccaaggagctggaagacctgaacaaatggggtcttaacatctttaatgtggctggatattctcacaatagacccctaacatgcatcatgtatgctatattccaggaaagagacctcctaaagacattcagaatctcatctgacacatttataacctacatgatgactttagaagaccattaccattctgacgtggcatatcacaacagcctgcacgctgctgatgtagcccagtcgacccatgttctcctttctacaccagcattagacgctgtcttcacagatttggagatcctggctgccatttttgcagctgccatccatgacgttgatcatcctggagtctccaatcagtttctcatcaacacaaattcagaacttgctttgatgtataatgatgaatctgtgttggaaaatcatcaccttgctgtgggtttcaaactgctgcaagaagaacactgtgacatcttcatgaatctcaccaagaagcagcgtcagacactcaggaagatggttattgacatggtgttagcaactgatatgtctaaacatatgagcctgctggcagacctgaagacaatggtagaaacgaagaaagttacaagttcaggcgttcttctcctagacaactataccgatcgcattcaggtccttcgcaacatggtacactgtgcagacctgagcaaccccaccaagtccttggaattgtatcggcaatggacagaccgcatcatggaggaatttttccagcagggagacaaagagcgggagaggggaatggaaattagcccaatgtgtgataaacacacagcttctgtggaaaaatcccaggttggtttcatcgactacattgtccatccattgtgggagacatgggcagatttggtacagcctgatgctcaggacattctcgataccttagaagataacaggaactggtatcagagcatgatacctcaaagtccctcaccaccactggacgagcagaacagggactgccagggtctgatggagaagtttcagtttgaactgactctcgatgaggaagattctgaaggacctgagaaggagggagagggacacagctatttcagcagcacaaagacgctttgtgtgattgatccagaaaacagagattccctgggagagactgacatagacattgcaacagaagacaagtcccccgtggatacataatccccctctccctgtggagatgaacattctatccttgatgagcatgccagctatgtggtagggccagcccaccatgggggccaagacctgcacaggacaagggccacctggcctttcagttacttgagtttggagtcagaaagcaagaccaggaagcaaatagcagctcaggaaatcccacggttgacttgccttgatggcaagcttggtggagagggctgaagctgttgctgggggccgattctgatcaagacacatggcttgaaaatggaagacacaaaactgagagatcattctgcactaagtttcgggaacttatccccgacagtgactgaactcactgactaataacttcatttatgaatcttctcacttgtccctttgtctgccaacctgtgtgccttttttgtaaaacattttcatgtctttaaaatgcctgttgaatacctggagtttagtatcaacttctacacagataagctttcaaagttgacaaacttttttgactctttctggaaaagggaaagaaaatagtcttccttctttcttgggcaatatccttcactttactacagttacttttgcaaacagacagaaaggatacacttctaaccacattttacttccttcccctgttgtccagtccaactccacagtcactcttaaaacttctctctgtttgcctgcctccaacagtacttttaactttttgctgtaaacagaataaaattgaacaaattagggggtagaaaggagcagtggtgtcgttcaccgtgagagtctgcatagaactcagcagtgtgccctgctgtgtcttggaccctgcaatgcggccgc

SEQ ID NO: 290 - protein, 736 aa, Homo sapiens
MKKSRSVMTVMADDNVKDYFECSLSKSYSSSSNTLGIDLWRGRRCCSGNLQLPPLSQRQSERARTPEGDGISRPTTLPLTTLPSIAITTVSQECFDVENGPSPGRSPLDPQASSSAGLVLHATFPGHSQRRESFLYRSDSDYDLSPKAMSRNSSLPSEQHGDDLIVTPFAQVLASLRSVRNNFTILTNLHGTSNKRSPAASQPPVSRVNPQEESYQKLAMETLEELDWCLDQLETIQTYRSVSEMASNKFKRMLNRELTHLSEMSRSGNQVSEYISNTFLDKQNDVEIPSPTQKDREKKKKQQLMTQISGVKKLMHSSSLNNTSISRFGVNTENEDHLAKELEDLNKWGLNIFNVAGYSHNRPLTCIMYAIFQERDLLKTFRISSDTFITYMMTLEDHYHSDVAYHNSLHAADVAQSTHVLLSTPALDAVFTDLEILAAIFAAAIHDVDHPGVSNQFLINTNSELALMYNDESVLENHHLAVGFKLLQEEHCDIFMNLTKKQRQTLRKMVIDMVLATDMSKHMSLLADLKTMVETKKVTSSGVLLLDNYTDRIQVLRNMVHCADLSNPTKSLELYRQWTDRIMEEFFQQGDKERERGMEISPMCDKHTASVEKSQVGFIDYIVHPLWETWADLVQPDAQDILDTLEDNRNWYQSMIPQSPSPPLDEQNRDCQGLMEKFQFELTLDEEDSEGPEKEGEGHSYFSSTKTLCVIDPENRDSLGETDIDIATEDKSPVDT

SEQ ID NO: 291 - DNA, 1223 bp, Homo sapiens
agctcggtcctgctggaggccacgggtgccacacactcggtcccgacatgatggcgagcatgcgagtggtgaaggagctggaggatcttcagaagaagcctcccccatacctgcggaacctgtccagcgatgatgccaatgtcctggtgtggcacgctctcctcctacccgaccaacctccctaccacctgaaagccttcaacctgcgcatcagcttcccgccggagtatccgttcaagcctcccatgatcaaattcacaaccaagatctaccaccccaacgtggacgagaacggacagatttgcctgcccatcatcagcagtgagaactggaagccttgcaccaagacttgccaagtcctggaggccctcaatgtgctggtgaatagaccgaatatcagggagcccctgcggatggacctcgctgacctgctgacacagaatccggagctgttcagaaagaatgccgaagagttcaccctccgattcggagtggaccggccctcctaactcatgttctgaccctctgtgcactggatcctcggcatagcggacggacacacctcatggactgaggccagagccccctgtggcccattccccattcatttttcccttcttaggttgttagtcattagtttgtgtgtgtgtgtggtggagggaagggagctatgagtgtgtgtgttgtgtatggactcactcccaggttcacctggccacaggtgcacccttcccacaccctttacattccccagagccaagggagtttaagtttgcagttacaggccagttctccagctctccatcttagagagacaggtcaccttgcaggcctgcttgcaggaaatgaatccagcagccaactcgaatccccctagggctcaggcactgagggcctggggacagtggagcatatgggtgggagacagatggagggtaccctatttacaactgagtcagccaagccactgatgggaatatacagatttaggtgctaaaccgtttattttccacggatgagtcacaatctgaagaatcaaacttccatcctgaaaatctatatgtttcaaaaccacttgccatcctgttagattgccagttcctgggaccaggcctcagactgtgaagtatatatcctccagcattcagtccagggggagccacggaaaccatgttcttgcttaagccattaaagtcagagatgaaaaaaaaaaaaaaaaaaaa

SEQ ID NO: 292 - protein, 153 aa, Homo sapiens
MMASMRVVKELEDLQKKPPPYLRNLSSDDANVLVWHALLLPDQPPYHLKAFNLRISFPPEYPFKPPMIKFTTKIYHPNVDENGQICLPIISSENWKPCTKTCQVLEALNVLVNRPNIREPLRMDLADLLTQNPELFRKNAEEFTLRFGVDRPS

SEQ ID NO: 293 - DNA, 825 bp, Homo sapiens
atggccgacaaggtcctgaaggagaagagaaagctgtttatccgttccatgggtgaagctcctcaggcagtgcaggacaacccagctatgcccacatcctcaggctcagaagggaatgtcaagctttgctccctagaagaagctcaaaggatatggaaacaaaagtcggcagagatttatccaataatggacaagtcaagccgcacacgtcttgctctcattatctgcaatgaagaatttgacagtattcctagaagaactggagctgaggttgacatcacaggcatgacaatgctgctacaaaatctggggtacagcgtagatgtgaaaaaaaatctcactgcttcggacatgactacagagctggaggcatttgcacaccgcccagagcacaagacctctgacagcacgttcctggtgttcatgtctcatggtattcgggaaggcatttgtgggaagaaacactctgagcaagtcccagatatactacaactcaatgcaatctttaacatgttgaataccaagaactgcccaagtttgaaggacaaaccgaaggtgatcatcatccaggcctgccgtggtgataatgtttcttggagacatcccacaatgggctctgtttttattggaagactcattgaacatatgcaagaatatgcctgttcctgtgatgtggaggaaattttccgcaaggttcgattttcatttgagcagccagatggtagagcgcagatgcccaccactgaaagagtgactttgacaagatgtttctacctcttcccaggacattaaaataaggaaactgtatgaatgtctgcgggcagg

SEQ ID NO: 294 - protein, 263 aa, Homo sapiens
MADKVLKEKRKLFIRSMGEAPQAVQDNPAMPTSSGSEGNVKLCSLEEAQRIWKQKSAEIYPIMDKSSRTRLALIICNEEFDSIPRRTGAEVDITGMTMLLQNLGYSVDVKKNLTASDMTTELEAFAHRPEHKTSDSTFLVFMSHGIREGICGKKHSEQVPDILQLNAIFNMLNTKNCPSLKDKPKVIIIQACRGDNVSWRHPTMGSVFIGRLIEHMQEYACSCDVEEIFRKVRFSFEQPDGRAQMPTTERVTLTRCFYLFPGH

SEQ ID NO: 295 - DNA, 2175 bp, Homo sapiens
gagaaattggagaagataaaactggacactggggagaccacaacttcatgctgcgtgggatctcccagctacctgcagtggccaccatgtcttgggtcctgctgcctgtactttggctcattgttcaaactcaagcaatagccataaagcaaacacctgaattaacgctccatgaaatagtttgtcctaaaaaacttcacattttacacaaaagagagatcaagaacaaccagacagaaaagcatggcaaagaggaaaggtatgaacctgaagttcaatatcagatgatcttaaatggagaagaaatcattctctccctacaaaaaaccaagcacctcctggggccagactacactgaaacattgtactcacccagaggagaggaaattaccacgaaacctgagaacatggaacactgttactataaaggaaacatcctaaatgaaaagaattctgttgccagcatcagtacttgtgacgggttgagaggatacttcacacatcatcaccaaagataccagataaaacctctgaaaagcacagacgagaaagaacatgccgtctttacatctaaccaggaggaacaagacccagctaaccacacatgtggtgtgaagagcactgacgggaaacaaggcccaattcgaatctctagatcactcaaaagcccagagaaagaagactttcttcgggcacagaaatacattgatctctatttggtgctggataatgccttttataagaactataatgagaatctaactctgataagaagctttgtgtttgatgtgatgaacctactcaatgtgatatataacaccatagatgttcaagtggccttggtaggtatggaaatctggtctgatggggataagataaaggtggtgcccagcgcaagcaccacgtttgacaacttcctgagatggcacagttctaacctggggaaaaagatccacgaccatgctcagcttctcagcgggattagcttcaacaatcgacgtgtgggactggcagcttcaaattccttgtgttccccatcttcggttgctgttattgaggctaaaaaaaagaataatgtggctcttgtaggagtgatgtcacatgagctgggccatgtccttggtatgcctgatgttccattcaacaccaagtgtccctctggcagttgtgtgatgaatcagtatctgagttcaaaattcccaaaggatttcagtacatcttgccgtgcacattttgaaagataccttttatctcagaaaccaaagtgcctgctgcaagcacctattcctacaaatataatgacaacaccagtgtgtgggaaccaccttctagaagtgggagaagactgtgattgtggctctcctaaggagtgtaccaatctctgctgtgaagccctaacgtgtaaactgaagcctggaactgattgcggaggagatgctccaaaccataccacagagtgaatccaaaagtctgcttcactgagatgctaccttgccaggacaagaaccaagaactctaactgtcccaggaatcttgtgaattttcacccataatggtctttcacttgtcattctactttctatattgttatcagtccaggaaacaggtaaacagatgtaattagagacattggctctttgtttaggcctaatctttctttttacttttttttttcttttttctttttttttaaagatcatgaatttgtgacttagttctgccctttggagaacaaaagaaagcagtcttccatcaaatcaccttaaaatgcacggctaaactattcagagttaacactccagaattgttaaattacaagtactatgctttaatgcttctttcatcttactagtatggcctataaaaaaaataataccacttgatgggtgaaggctttggcaatagaaagaagaatagaattcaggttttatgttattcctctgtgttcacttcgccttgctcttgaaagtgcagtatttttctacatcatgtcgagaatgattcaatgtaaatatttttcattttatcatgtatatcctatacacacatctccttcatcatcatatatgaagtttattttgagaagtctacattgcttacattttaattgagccagcaaagaaggcttaatgatttattgaaccataatgtcaataaaaacacaacttttgaggc

SEQ ID NO: 296 - protein, 354 aa, Homo sapiens
MLRGISQLPAVATMSWVLLPVLWLIVQTQAIAIKQTPELTLHEIVCPKKLHILHKREIKNNQTEKHGKEERYEPEVQYQMILNGEEIILSLQKTKHLLGPDYTETLYSPRGEEITTKPENMEHCYYKGNILNEKNSVASISTCDGLRGYFTHHHQRYQIKPLKSTDEKEHAVFTSNQEEQDPANHTCGVKSTDGKQGPIRISRSLKSPEKEDFLRAQKYIDLYLVLDNAFYKNYNENLTLIRSFVFDVMNLLNVIYNTIDVQVALVGMEIWSDGDKVIEAKKKNNVALVGVMSHELGHVLGMPDVPFNTKCPSGSCVMNQYLSSKFPKDFSTSCTCKLKPGTDCGGDAPNHTTE

SEQ ID NO: 297 - DNA, 2586 bp, Homo sapiens
ggcggaaaagccgccggtgctctgacggcctcgttcccctagcagttgcgggggagtttcctgccggcgcggctggagtctctgattctcagggttcggtggttggaagatgctccagagagacgaggctgcggcggaggaggtggcggcggccgaatcggcaacggcgctagggtggagagaaggcggcagcggcggcggcggcggcgtgaggggccgggcggtgtaaacagccccggaggcggcggaggcggcggtcgagaccccgagggggaagcggcggctgagtcagggtcgcgcctccgttggaaacttgggctgagtaccgcggcgggcgcgagcgaggcgccctagacatcttctccctcccttgcctcagacttattgcaaaacatgggtgcatttttggataaacccaaaactgaaaaacataatgctcatggtgctgggaatggtttacgttatggcctgagcagcatgcaaggatggagagtggaaatggaagatgcacacacagctgttgtaggtattcctcacggcttggaagactggtcattttttgcagtttatgatggtcatgctggatcccgagtggcaaattactgctcaacacatttattagaacacatcactactaacgaagactttagggcagctggaaaatcaggatctgctcttgagctttcagtggaaaatgttaagaatggtatcagaactggatttttgaaaattgatgaatacatgcgtaacttttcagacctcagaaacgggatggacaggagtggttcaactgcagtgggagttatgatttcacctaagcatatctactttatcaactgtggtgattcacgtgctgttctgtataggaatggacaagtctgcttttctacccaggatcacaaaccttgcaatccaagggaaaaggagcgaatccaaaatgcaggaggcagcgtgatgatacaacgtgttaatggttcattagcagtatctcgtgctctgggggactatgattacaagtgtgttgatggcaagggcccaacagaacaacttgtttctccagagcctgaggtttatgaaattttaagagcagaagaggatgaatttatcatcttggcttgtgatgggatctgggatgttatgagtaatgaggagctctgtgaatatgttaaatctaggcttgaggtatctgatgacctggaaaatgtgtgcaattgggtagtggacacttgtttacacaagggaagtcgagataacatgagtattgtactagtttgcttttcaaatgctcccaaggtctcagatgaagcggtgaaaaaagattcagagttggataagcacttggaatcacgggttgaagagattatggagaagtctggcgaggaaggaatgcctgatcttgcccatgtcatgcgcatcttgtctgcagaaaatatcccaaatttgcctcctgggggaggtcttgctggcaagcgtaatgttattgaagctgtttatagtagactgaatccacatagagaaagtgatggggcctccgatgaagcagaggaaagtggatcacagggaaaattggtggaagctctcaggcaaatgagaattaatcataggggaaactaccgacaacttctggaggagatgctgactagttacaggctagctaaagtagagggagaagaaagccctgctgaaccagctgccacagctacttcttcgaacagtgatgctggaaacccagtgacaatgcaggaaagccatactgaatcagaaagtggtcttgctgaattagacagctctaatgaagatgcagggacaaagatgagtggtgaaaaaatatgactttcctttttggtaatatttttgtgatctttgatggtttttaacctaggaagtgtaatgtatgcatttatataactgttttgttatttgaatcttggaaaactagttttattatattcagatagccttgttttttaaaaaggcctttgcatacacctttatgagatagtgtaaaattgactatttatagtactatggatttaatgaaattatatgtcatttcacattgtatgccagaaattaggctaccaattatgaattaaagtcagtagttaaattaatactagatagaattagaaattttgattagagagattatgctatattatggaaaaacttgttaatgtagaattatactgcttcatattattttacctattagtacactcatagttagctttgtaataaatttatgttttctttaataattttagttcttcaaagaatggctgatgctggcctgtaatttttctttcaaggatgataatttgtgtgttgtttgatttgtttatattttacatctctgtagttttatttttagaagttgtgagatattggatgtgtggctatttttcctttctctgtattctttatgaaacataacttttgaaaaacctatgtattattcatacagctttggtttgtatattctgtatagcctaactacacacatcaaaatgtatgtcaaccaagtgtttagaatgaaattataagtgtttaagtccaaataaagcatgtgatgtggaataatct

SEQ ID NO: 298 - protein, 479 aa, Homo sapiens
MGAFLDKPKTEKHNAHGAGNGLRYGLSSMQGWRVEMEDAHTAVVGIPHGLEDWSFFAVYDGHAGSRVANYCSTHLLEHITTNEDFRAAGKSGSALELSVENVKNGIRTGFLKIDEYMRNFSDLRNGMDRSGSTAVGVMISPKHIYFINCGDSRAVLYRNGQVCFSTQDHKPCNPREKERIQNAGGSVMIQRVNGSLAVSRALGDYDYKCVDGKGPTEQLVSPEPEVYEILRAEEDEFIILACDGIWDVMSNEELCEYVKSRLEVSDDLENVCNWVVDTCLHKGSRDNMSIVLVCFSNAPKVSDEAVKKDSELDKHLESRVEEIMEKSGEEGMPDLAHVMRILSAENIPNLPPGGGLAGKRNVIEAVYSRLNPHRESDGASDEAEESGSQGKLVEALRQMRINHRGNYRQLLEEMLTSYRLAKVEGEESPAEPAATATSSNSDAGNPVTMQESHTESESGLAELDSSNEDAGTKMSGEKI

SEQ ID NO: 299 - DNA, 1794 bp, Homo sapiens
tacagctttgattttataacatcctgctaatttttgttcttacagaaatacactttcgggaaatggcctctaaatcctggctgaattttttaaccttcctctgtggatcagcaataggatttcttttatgttctcagctatttagtattttgttgggagaaaaggttgacacccagcctaatgttcttcataatgatcctcatgcaaggcattcagatgataatggacagaatcatctagaaggacaaatgaacttcaatgcagattctagccaacataaagatgagaacacagacattgctgaaaacctctatcagaaagttagaattctttgctgggttatgaccggccctcaaaacctagagaaaaaggccaaacacgtcaaagctacttgggcccagcgttgtaacaaagtgttgtttatgagttcagaagaaaataaagacttccctgctgtgggactgaaaaccaaagaaggcagagatcaactatactggaaaacaattaaagcttttcagtatgttcatgaacattatttagaagatgctgattggtttttgaaagcagatgatgacacgtatgtcatactagacaatttgaggtggcttctttcaaaatacgaccctgaagaacccatttactttgggagaagatttaagccttatgtaaagcagggctacatgagtggaggagcaggatatgtactaagcaaagaagccttgaaaagatttgttgatgcatttaaaacagacaagtgtacacatagttcctccattgaagacttagcactggggagatgcatggaaattatgaatgtagaagcaggagattccagagataccattggaaaagaaacttttcatccctttgtgccagaacaccatttaattaaaggttatctacctagaacgttttggtactggaattacaactattatcctcctgtagagggtcctggttgctgctctgatcttgcagtttcttttcactatgttgattctacaaccatgtatgagttagaatacctcgtttatcatcttcgtccatatggttatttatacagatatcaacctaccttacctgaacgtatactaaaggaaattagtcaagcaaacaaaaatgaagatacaaaagtgaagttaggaaatccttgaaagaaaatcatgaatgaacaaaggtaatatgtctagcactgcactgaaaaaggacttctgcatttctgacatagaacactggaatcccagtgaggaattctaagtgaacattccttatagaaacctttcacatgaatgactataaactgaagctttaaatgagctgtgaagtgtgttaaaatgtgttttgatacagtaatatataaatatgtctatatatatgaggaacttgtgttttttaaatggtggccaggtagaggaactagaaaagagattttgttgcctgttttctgaccatctgtgttattgtcactgagaaactaaaatagtaaatttactaaaactacactgcaccatgttagtaataaacagatctgccttaaagaaaagaaaattttagaaagaaatattgttgctcagtgttgttaatatagctcaagaattgagtttatatttgcagtatgctataaatgatacccccctaccacacccacacacacagtttttgtctaatgaaaatgttgctgtgattatttataattggtagtatttcttccagaagaagctaaaataagactggcacttaccctgaagtgcattaataaaaccacactttaaaattaaaaaaaaaaaaaaaaaa

SEQ ID NO: 300 - protein, 363 aa, Homo sapiens
MASKSWLNFLTFLCGSAIGFLLCSQLFSILLGEKVDTQPNVLHNDPHARHSDDNGQNHLEGQMNFNADSSQHKDENTDIAENLYQKVRILCWVMTGPQNLEKKAKHVKATWAQRCNKVLFMSSEENKDFPAVGLKTKEGRDQLYWKTIKAFQYVHEHYLEDADWFLKADDDTYVILDNLRWLLSKYDPEEPIYFGRRFKPYVKQGYMSGGAGYVLSKEALKRFVDAFKTDKCTHSSSIEDLALGRCMEIMNVEAGDSRDTIGKETFHPFVPEHHLIKGYLPRTFWYWNYNYYPPVEGPGCCSDLAVSFHYVDSTTMYELEYLVYHLRPYGYLYRYQPTLPERILKEISQANKNEDTKVKLGNP

SEQ ID NO: 301 - DNA, 2212 bp, Homo sapiens
ccgccgccacagctgcagtcagcaccgtcaccccagcagcatccgccgcctgcaccgcgcgtgcggcccgccccggcctgaccccgccgccgaacccggcgccagccatggagcccgaagccccccgtcgccgccacacccatcagcgcggctacctgctgacacggaaccctcacctcaacaaggacttggcctttaccctggaagagagacagcaattgaacattcatggattgttgccaccttccttcaacagtcaggagatccaggttcttagagtagtaaaaaatttcgagcatctgaactctgactttgacaggtatcttctcttaatggatctccaagatagaaatgaaaaactcttttatagagtgctgacatctgacattgagaaattcatgcctattgtttatactcccactgtgggtctggcttgccaacaatatagtttggtgtttcggaagccaagaggtctctttattactatccacgatcgagggcatattgcttcagttctcaatgcatggccagaagatgtcatcaaggccattgtggtgactgatggagagcgtattcttggcttgggagaccttggctgtaatggaatgggcatccctgtgggtaaattggctctatatacagcttgcggagggatgaatcctcaagaatgtctgcctgtcattctggatgtgggaaccgaaaatgaggagttacttaaagatccactctacattggactacggcagagaagagtaagaggttctgaatatgatgattttttggacgaattcatggaggcagtttcttccaagtatggcatgaattgccttattcagtttgaagattttgccaatgtgaatgcatttcgtctcctgaacaagtatcgaaaccagtattgcacattcaatgatgatattcaaggaacagcatctgttgcagttgcaggtctccttgcagctcttcgaataaccaagaacaaactgtctgatcaaacaatactattccaaggagctggagaggctgccctagggattgcacacctgattgtgatggccttggaaaaagaaggtttaccaaaagagaaagccatcaaaaagatatggctggttgattcaaaaggattaatagttaagggacgtgcttccttaacacaagagaaagagaagtttgcccatgaacatgaagaaatgaagaacctagaagccattgttcaagaaataaaaccaactgccctcataggagttgctgcaattggtggtgcattctcagaacaaattctcaaagatatggctgccttcaatgaacggcctattatttttgctttgagtaatccaactagcaaagcagaatgttctgcagagcagtgctacaaaataaccaagggacgtgcaatttttgccagtggcagtccttttgatccagtcactcttccaaatggacagaccctatatcctggccaaggcaacaattcctacgtgttccctggagttgctcttggtgttgtggcgtgtggattgaggcagatcacagataatattttcctcactactgctgaggttatagctcagcaagtgtcagataaacacttggaagagggtcggctttatcctcctttgaataccattagagatgtttctctgaaaattgcagaaaagattgtgaaagatgcataccaagaaaagacagccacagtttatcctgaaccgcaaaacaaagaagcatttgtccgctcccagatgtatagtactgattatgaccagattctacctgattgttattcttggcctgaagaggtgcagaaaatacagaccaaagttgaccagtaggataatagcaaacatttctaactctattaatgaggtctttaaacctttcataatttttaaaggttggaatcttttataatgattcataagacacttagattaagattttactttaacagtctaaaaattgatagaagaatatcgatataaattgggataaacatcacatgagacaattttgcttcactttgccttctggttatttatggtttctgtctgaattattctgcctacgttctctttaaaagctgttgtacgtactacggagaaactcatcatttttatacaggacactaatgggaagaccaaaattactaataaattgaaataaccaacattaaaactcataattattttgttgaccattttgttaaaatctacttttc

SEQ ID NO: 302 - protein, 572 aa, Homo sapiens
MEPEAPRRRHTHQRGYLLTRNPHLNKDLAFTLEERQQLNIHGLLPPSFNSQEIQVLRVVKNFEHLNSDFDRYLLLMDLQDRNEKLFYRVLTSDIEKFMPIVYTPTVGLACQQYSLVFRKPRGLFITIHDRGHIASVLNAWPEDVIKAIVVTDGERILGLGDLGCNGMGIPVGKLALYTACGGMNPQECLPVILDVGTENEELLKDPLYIGLRQRRVRGSEYDDFLDEFMEAVSSKYGMNCLIQFEDFANVNAFRLLNKYRNQYCTFNDDIQGTASVAVAGLLAALRITKNKLSDQTILFQGAGEAALGIAHLIVMALEKEGLPKEKAIKKIWLVDSKGLIVKGRASLTQEKEKFAHEHEEMKNLEAIVQEIKPTALIGVAAIGGAFSEQILKDMAAFNERPIIFALSNPTSKAECSAEQCYKITKGRAIFASGSPFDPVTLPNGQTLYPGQGNNSYVFPGVALGVVACGLRQITDNIFLTTAEVIAQQVSDKHLEEGRLYPPLNTIRDVSLKIAEKIVKDAYQEKTATVYPEPQNKEAFVRSQMYSTDYDQILPDCYSWPEEVQKIQTKVDQ

SEQ ID NO: 303 - DNA, 2984 bp, Homo sapiens
gaattcggcacgaggtggtggccgcgcacccggccgcggctgattcattcacttcaagtgccgtgcagaaggctcggcaggcggggcgggcgtggggccgcggctccgggttggggaccgaggagatccggctgtggaccagacgctcctctgcggggcgggcacccaagcgcgctcgccaccccctcgccatccgctagagccgggctcctggactgggactcgggcccgccgcacagttgaaaagtcgcatagtggtttttccgctcgcgtcgctgtgtgaaagttggctcgccgctctttgcacgccctccctggaggccgacccgagacgccaagctggagagaccgtgcctccccgaggccggccgccccgcgagcacagcctccgcccccgttgcactgccgggctgggcaatatgaaggagcagccctcatgtgccggcaccgggcatccgagcatggcgggaggaggcctaccagaaactggccagcgagaccctggaggagctggactggtgtctggaccagctagagaccctacagaccaggcactccgtcagtgagatggcctccaacaagtttaaaaggatgcttaatcgggagctcacccatctctctgaaatgagtcggtctggaaatcaagtgtcagagtttatatcaaacacattcttagataagcaacatgaagtggaaattccttctccaactcagaaggaaaaggagaaaaagaaaagaccaatgtctcagatcagtggagtcaagaaattgatgcacagctctagtctgactaattcaagtatcccaaggtttggagttaaaactgaacaagaagatgtccttgccaaggaactagaagatgtgaacaaatggggtcttcatgttttcagaatagcagagttgtctggtaaccggcccttgactgttatcatgcacaccatttttcaggaacgggatttattaaaaacatttaaaattccagtagatactttaattacatatcttatgactctcgaagaccattaccatgctgatgtggcctatcacaacaatatccatgctgcagatgttgtccagtctactcatgtgctattatctacacctgctttggaggctgtgtttacagatttggagattcttgcagcaatttttgccagtgcaatacatgatgtagatcatcctggtgtgtccaatcaatttctgatcaatacaaactctgaacttgccttgatgtacaatgattcctcagtcttagagaaccatcatttggctgtgggctttaaattgcttcaggaagaaaactgtgacattttccagaatttgaccaaaaaacaaagacaatctttaaggaaaatggtcattgacatcgtacttgcaacagatatgtcaaaacacatgaatctactggctgatttgaagactatggttgaaactaagaaagtgacaagctctggagttcttcttcttgataattattccgataggattcaggttcttcagaatatggtgcactgtgcagatctgagcaacccaacaaagcctctccagctgtaccgccagtggacggaccggataatggaggagttcttccgccaaggagaccgagagagggaacgtggcatggagataagccccatgtgtgacaagcacaatgcttccgtggaaaaatcacaggtgggcttcatagactatattgttcatcccctctgggagacatgggcagacctcgtccaccctgacgcccaggatattttggacactttggaggacaatcgtgaatggtaccagagcacaatccctcagagcccctctcctgcacctgatgacccagaggagggccggcagggtcaaactgagaaattccagtttgaactaactttagaggaagatggtgagtcagacacggaaaaggacagtggcagtcaagtggaagaagacactagctgcagtgactccaagactctttgtactcaagactcagagtctactgaaattccccttgatgaacaggttgaagaggaggcagtaggggaagaagaggaaagccagcctgaagcctgtgtcatagatgatcgttctcctgacacgtaacagtgcaaaaactttcatgccttttttttttttaagtagaaaaattgtttccaaagtgcatgtcacatgccacaaccacggtcacacctcactgtcatctgccaggacgtttgttgaacaaaactgaccttgactactcagtccagcgctcaggaatatcgtaaccagttttttcacctccatgttcatccgagcaaggtggacatcttcacgaacagcgtttttaacaagatttcagcttggtagagctgacaaagcagataaaatctactccaaattattttcaagagagtgtgactcatcaggcagcccaaaagtttattggacttggggtttctattcctttttatttgtttgcaatattttcagaagaaaggcattgcacagagtgaacttaatggacgaagcaacaaatatgtcaagaacaggacatagcacgaatctgttaccagtaggaggaggatgagccacagaaattgcataattttctaatttcaagtcttcctgatacatgactgaatagtgtggttcagtgagctgcactgacctctacattttgtatgatatgtaaaacagattttttgtagagcttacttttattattaaatgtattgaggtattatatttaaaaaaaactatgttcagaacttcatctgccactggttatttttttctaaggagtaacttgcaagttttcagtacaaatctgtgctacactggataaaaatctaatttatgaattttacttgcaccttatagttcatagcaattaactgatttgtagtgattcattgtttgttttatataccaatgacttccatattttaaaagagaaaaacaactttatgttgcaggaaaccctttttgtaagtctttattatttactttgcatt

SEQ ID NO: 304 - protein, 507 aa, Homo sapiens
MASNKFKRMLNRELTHLSEMSRSGNQVSEFISNTFLDKQHEVEIPSPTQKEKEKKKRPMSQISGVKKLMHSSSLTNSSIPRFGVKTEQEDVLAKELEDVNKWGLHVFRIAELSGNRPLTVIMHTIFQERDLLKTFKIPVDTLITYLMTLEDHYHADVAYHNNIHAADVVQSTHVLLSTPALEAVFTDLEILAAIFASAIHDVDHPGVSNQFLINTNSELALMYNDSSVLENHHLAVGFKLLQEENCDIFQNLTKKQRQSLRKMVIDIVLATDMSKHMNLLADLKTMVETKKVTSSGVLLLDNYSDRIQVLQNMVHCADLSNPTKPLQLYRQWTDRIMEEFFRQGDRERERGMEISPMCDKHNASVEKSQVGFIDYIVHPLWETWADLVHPDAQDILDTLEDNREWYQSTIPQSPSPAPDDPEEGRQGQTEKFQFELTLEEDGESDTEKDSGSQVEEDTSCSDSKTLCTQDSESTEIPLDEQVEEEAVGEEEESQPEACVIDDRSPDT

SEQ ID NO: 305 - DNA, 978 bp, Homo sapiens
cgaaaatggctaaattcgtgatccgcccagccactgccgccgactgcagtgacatactgcggctgatcaaggagctggctaaatatgaatacatggaagaacaagtaatcttaactgaaaaagatctgctagaagatggttttggagagcaccccttttaccactgcctggttgcagaagtgccgaaagagcactggactccggaaggacacagcattgttggttttgccatgtactattttacctatgacccgtggattggcaagttattgtatcttgaggacttcttcgtgatgagtgattatagaggctttggcataggatcagaaattctgaagaatctaagccaggttgcaatgaggtgtcgctgcagcagcatgcacttcttggtagcagaatggaatgaaccatccatcaacttctataaaagaagaggtgcttctgatctgtccagtgaagagggttggagactgttcaagatcgacaaggagtacttgctaaaaatggcaacagaggagtgaggagtgctgctgtagatgacaacctccattctattttagaataaattcccaacttctcttgctttctatgctgtttgtagtgaaataatagaatgagcacccattccaaagctttattaccagtggcgttgttgcatgtttgaaatgagggaattccctctgttccttcatctccgaggccgagagcctctgccagaactggcggggatggcgcaaacagtcagcggggcccaattcccccactggcggcggtggcggaggtggcagtggcggtaccagaatgcgagatggactggtgatcccattggtggagctgtcagcaaagcaggtggcatttcatatcccatttgaagtggtggagaaagtttacccaccagtgcctgagcagctacagctccgaattgctttttggagcttccctgagaatgaagaggacattcggctgtattcgtgcctg

SEQ ID NO: 306 - protein, 171 aa, Homo sapiens
MAKFVIRPATAADCSDILRLIKELAKYEYMEEQVILTEKDLLEDGFGEHPFYHCLVAEVPKEHWTPEGHSIVGFAMYYFTYDPWIGKLLYLEDFFVMSDYRGFGIGSEILKNLSQVAMRCRCSSMHFLVAEWNEPSINFYKRRGASDLSSEEGWRLFKIDKEYLLKMATEE

SEQ ID NO: 307 - DNA, 2779 bp, Homo sapiens
catggatttcgacattgctggacctgccacaggctgggctcttgtgctagaaatgacttgctagctagacatcatggttcaggatctgagtcagaggtttaaccatttataagcttttttcttatgaaaaattggcactaattataatgtctaactgtcagagttgttgcaggctttacaggagacgcgggctgtgaagatgctttgtaaattgtgaagcgttattaaagaacacatctttttttttaggaaaccacggtgcaaatttaattgccggggaagataacgggccttggtgccctccaagcgtcagctgagtttccaagaagccgggcagcgggcgcccgcgggttcgtctctggctcctcctccgccacagcagccgggggcccgggtcggaggcggcgggggccgagcgcccggcctcgcaagcccacggcccgctgggggtgccgtcccgcgccggggcggagcaggccccggcagcccagttcctcattctatcagcggtacaaggggctggtggcgccacaggcgctgggaccgcgggcggacaaggatgggtccgcgcggcgcggcgagcttgccccgaggccccggacctcggcggctgctcctccccgtcgtcctcccgctgctgctgctgctgttgttggcgccgccgggctcgggcgccggggccagccggccgccccacctggtcttcttgctggcagacgacctaggctggaacgacgtcggcttccacggctcccgcatccgcacgccgcacctggacgcgctggcggccggcggggtgctcctggacaactactacacgcagccgctgtgcacgccgtcgcggagccagctgctcactggccgctaccagatccgtacaggtttacagcaccaaataatctggccctgtcagcccagctgtgttcctctggatgaaaaactcctgccccagctcctaaaagaagcaggttatactacccatatggtcggaaaatggcacctgggaatgtaccggaaagaatgccttccaacccgccgaggatttgatacctactttggatatctcctgggtagtgaagattattattcccatgaacgctgtacattaattgacgctctgaatgtcacacgatgtgctcttgattttcgagatggcgaagaagttgcaacaggatataaaaatatgtattcaacaaacatattcaccaaaagggctatagccctcataactaaccatccaccagagaagcctctgtttctctaccttgctctccagtctgtgcatgagccccttcaggtccctgaggaatacttgaagccatatgactttatccaagacaagaacaggcatcactatgcaggaatggtgtcccttatggatgaagcagtaggaaatgtcactgcagctttaaaaagcagtgggctctggaacaacacggtgttcatcttttctacagataacggagggcagactttggcagggggtaataactggccccttcgaggaagaaaatggagcctgtgggaaggaggcgtccgaggggtgggctttgtggcaagccccttgctgaagcagaagggcgtgaagaaccgggagctcatccacatctctgactggctgccaacactcgtgaagctggccaggggacacaccaatggcacaaagcctctggatggcttcgacatgtggaaaaccatcagtgaaggaagcccatcccccagaattgagctgctgcataatattgacccgaacttcgtggactcttcaccgtgtcccaggaacagcatggctccagcaaaggatgactcttctcttccagaatattcagcctttaacacatctgtccatgctgcaattagacatggaaattggaaactcctcacgggctacccaggctgtggttactggttccctccaccgtctcaatacaatgtttctgagataccctcatcagacccaccaaccaagaccctctggctctttgatattgatcgggaccctgaagaaagacatgacctgtccagagaatatcctcacatcgtcacaaagctcctgtcccgcctacagttctaccataaacactcagtccccgtgtacttccctgcacaggacccccgctgtgatcccaaggccactggggtgtggggcccttggatgtaggatttcagggaggctagaaaacctttcaattggaagttggacctcaggccttttctcacgactcttgtctcatttgttatcccaacctgggttcacttggcccttctcttgctcttaaaccacaccgaggtgtctaatttcaacccctaatgcatttaagaagctgataaaatctgcaacactcctgctgttggctggagcatgtgtctagaggtgggggtggctgggtttatccccctttcctaagccttgggacagctgggaacttaacttgaaataggaagttctcactgaatcctggaggctggaacagctggctcttttagactcacaagtcagacgttcgattcccctctgccaatagccagttttattggagtgaatcacatttcttacgcaaatgaagggagcagacagtgattaatggttctgttggcaaggcttctccctgtcggtgaaggatcatgttcaggcactccaagtgaaccacccctcttggttcaccccttactcacttatctcatcacagagcataaggcccattttgttgttcaggtcaacagcaaaatgcctgcaccatgactgtggcttttaaaataaagaaatgtgtttttatcg

SEQ ID NO: 308 - protein, 533 aa, Homo sapiens
MGPRGAASLPRGPGPRRLLLPVVLPLLLLLLLAPPGSGAGASRPPHLVFLLADDLGWNDVGFHGSRIRTPHLDALAAGGVLLDNYYTQPLCTPSRSQLLTGRYQIRTGLQHQIIWPCQPSCVPLDEKLLPQLLKEAGYTTHMVGKWHLGMYRKECLPTRRGFDTYFGYLLGSEDYYSHERCTLIDALNVTRCALDFRDGEEVATGYKNMYSTNIFTKRAIALITNHPPEKPLFLYLALQSVHEPLQVPEEYLKPYDFIQDKNRHHYAGMVSLMDEAVGNVTAALKSSGLWNNTVFIFSTDNGGQTLAGGNNWPLRGRKWSLWEGGVRGVGFVASPLLKQKGVKNRELIHISDWLPTLVKLARGHTNGTKPLDGFDMWKTISEGSPSPRIELLHNIDPNFVDSSPCPRNSMAPAKDDSSLPEYSAFNTSVHAAIRHGNWKLLTGYPGCGYWFPPPSQYNVSEIPSSDPPTKTLWLFDIDRDPEERHDLSREYPHIVTKLLSRLQFYHKHSVPVYFPAQDPRCDPKATGVWGPWM

SEQ ID NO: 309 - DNA, 1707 bp, Homo sapiens
atgcctagcacagaccttctgatgttgaaggcctttgagccctacttagagattttggaagtatactccacaaaagccaagaattatgtaaatggacattgcaccaagtatgagccctggcagctaattgcatggagtgtcgtgtggaccctgctgatagtctggggatatgagtttgtcttccagccagagagtttatggtcaaggtttaaaaagaaatgttttaagctcaccaggaagatgcccattattggtcgtaagattcaagacaagttgaacaagaccaaggatgatattagcaagaacatgtcattcctgaaagtggacaaagagtatgtgaaagctttaccctcccagggtctgagctcatctgctgttttggagaaacttaaggagtacagctctatggacgccttctggcaagaggggagagcctctggaacagtgtacagtggggaggagaagctcactgagctccttgtgaaggcttatggagattttgcatggagtaaccccctgcatccagatatcttcccaggactacgcaagatagaggcagaaattgtgaggatagcttgttccctgttcaatgggggaccagattcgtgtggatgtgtgacttctgggggaacagaaagcatactcatggcctgcaaagcatatcgggatctggcctttgagaaggggatcaaaactccagaaattgtggctccccaaagtgcccatgctgcatttaacaaagcagccagttactttgggatgaagattgtgcgggtcccattgacgaagatgatggaggtggatgtgagggcaatgagaagagctatctccaggaacactgccatgctcgtctgttctaccccacagtttcctcatggtgtaatagatcctgtccctgaagtggccaagctggctgtcaaatacaaaataccccttcatgtcgacgcttgtctgggaggcttcctcatcgtctttatggagaaagcaggatacccactggagcacccatttgatttccgggtgaaaggtgtaaccagcatttcagctgacacccataagtatggctatgccccaaaaggctcatcattggtgttgtatagtgacaagaagtacaggaactatcagttcttcgtcgatacagattggcagggtggcatctatgcttccccaaccatcgcaggctcacggcctggtggcattagcgcagcctgttgggctgccttgatgcacttcggtgagaacggctatgttgaagctaccaaacagatcatcaaaactgctcgcttcctcaagtcagaactggaaaatatcaaaggcatctttgtttttgggaatccccaattgtcagtcattgctctgggatcccgtgattttgacatctaccgactatcaaacctgatgactgctaaggggtggaacttgaaccagttgcagttcccacccagtattcatttctgcatcacattactacacgcccggaaacgagtagctatacaattcctaaaggacattcgagaatctgtcactcaaatcatgaagaatcctaaagcgaagaccacaggaatgggtgccatctatggcatggcccagacaactgttgacaggaatatggttgcagaattgtcctcagtcttcttggacagcttgtacagcaccgacactgtcacccagggcagccagatgaatggttctccaaaaccccactga

SEQ ID NO: 310 - protein, 568 aa, Homo sapiens
MPSTDLLMLKAFEPYLEILEVYSTKAKNYVNGHCTKYEPWQLIAWSVVWTLLIVWGYEFVFQPESLWSRFKKKCFKLTRKMPIIGRKIQDKLNKTKDDISKNMSFLKVDKEYVKALPSQGLSSSAVLEKLKEYSSMDAFWQEGRASGTVYSGEEKLTELLVKAYGDFAWSNPLHPDIFPGLRKIEAEIVRIACSLFNGGPDSCGCVTSGGTESILMACKAYRDLAFEKGIKTPEIVAPQSAHAAFNKAASYFGMKIVRVPLTKMMEVDVRAMRRAISRNTAMLVCSTPQFPHGVIDPVPEVAKLAVKYKIPLHVDACLGGFLIVFMEKAGYPLEHPFDFRVKGVTSISADTHKYGYAPKGSSLVLYSDKKYRNYQFFVDTDWQGGIYASPTIAGSRPGGISAACWAALMHFGENGYVEATKQIIKTARFLKSELENIKGIFVFGNPQLSVIALGSRDFDIYRLSNLMTAKGWNLNQLQFPPSIHFCITLLHARKRVAIQFLKDIRESVTQIMKNPKAKTTGMGAIYGMAQTTVDRNMVAELSSVFLDSLYSTDTVTQGSQMNGSPKPH

SEQ ID NO: 311 - DNA, 2087 bp, Homo sapiens
gcgagaagagcagacaccgtgctcctggaatcacccagcatgttgcaaggtctcctgccagtcagtctcctcctctctgttgcagtaagtgctataaaagaactccctggggtgaagaagtatgaagtggtttatcctataagacttcatccactgcataaaagagaggccaaagagccagagcaacaggaacaatttgaaactgaattaaagtataaaatgacaattaatggaaaaattgcagtgctttatttgaaaaaaaacaagaacctccttgcaccaggctacacggaaacatattataattccactggaaaggagatcaccacaagcccacaaattatggatgattgttattatcaaggacatattcttaatgaaaaggtttctgacgctagcatcagcacatgtaggggtctaaggggctacttcagtcagggggatcaaagatactttattgaacctttaagccccatacatcgggatggacaggagcatgcactcttcaagtataaccctgatgaaaagaattatgacagcacctgtgggatggatggtgtgttgtgggcccacgatttgcagcagaacattgccctacctgccaccaaactagtaaaattgaaagacaggaaggttcaggaacatgagaaatacatagaatattatctggtcctggataatggtgagtttaaaaggtacaatgagaatcaagatgagatcagaaagagggtatttgagatggctaattatgtcaacatgctttataaaaagctcaatactcatgtggccttagttggtatggaaatctggactgacaaggataagataaagataaccccaaatgcaagcttcaccttggagaatttttctaaatggagggggagtgttctctcaagaagaaagcgtcatgatattgctcagttaatcacagcaacagaacttgctggaacgactgtgggtcttgcatttatgtctacaatgtgttctccttattctgttggcgttgttcaggaccacagcgataatcttcttagagttgcagggacaatggcacatgaaatgggccacaactttggaatgtttcatgacgactattcttgcaagtgtccttctacaatatgtgtgatggacaaagcactgagcttctatatacccacagacttcagttcctgcagccgtctcagctatgacaagttttttgaagataaattatcaaattgcctctttaatgctccattgcctacagatatcatatccactccaatttgtgggaaccagttggtggaaatgggagaggactgtgattgtgggacatctgaggaatgtaccaatatttgctgtgatgctaagacatgtaaaatcaaagcaacttttcaatgtgcattaggagaatgttgtgaaaaatgccaatttaaaaaggctgggatggtgtgcagaccagcaaaagatgagtgcgacctgcctgaaatgtgtaatggtaaatctggtaattgtcctgatgatagattccaagtcaatggcttcccttgccatcacgggaagggccactgcttgatgggcacatgccccacactgcgggagcagtgcacagagctgtggggaccaggtaggaggacaaatcctttcccctgtgcatgtgcgaaggaaaatcatttcagatgacagtgtttaaccatggtcaaaagaccattctgtcctatccttcttagaagcttcgaactcaaaatcatggaaaggttttaagatttgaggttggttttagggttgctagatttagcaagtaaaaataaggatggccccgttaaattttaacttaaaattaacaagttttttgttaattttttgttttttgtctcagcatcagtatatcccatgcaatatttgaggtgtgctcatactaaaattatttgtgtatctgaaattcaaattaaactgggtgtctttttcttttcatctggcaaccctactaagatcataaacccttggaaatctgtgtgtgtgcgggtgtgtgtgtgtgtgtgtgtgcaggggtggcagaagtactgtgggatgggacagaaataaaaaaaaaaaaaaaaaaaaaaaaa

SEQ ID NO: 312 - protein, 540 aa, Homo sapiens
MLQGLLPVSLLLSVAVSAIKELPGVKKYEVVYPIRLHPLHKREAKEPEQQEQFETELKYKMTINGKIAVLYLKKNKNLLAPGYTETYYNSTGKEITTSPQIMDDCYYQGHILNEKVSDASISTCRGLRGYFSQGDQRYFIEPLSPIHRDGQEHALFKYNPDEKNYDSTCGMDGVLWAHDLQQNIALPATKLVKLKDRKVQEHEKYIEYYLVLDNGEFKRYNENQDEIRKRVFEMANYVNMLYKKLNTHVALVGMEIWTDKDKIKITPNASFTLENFSKWRGSVLSRRKRHDIAQLITATELAGTTVGLAFMSTMCSPYSVGVVQDHSDNLLRVAGTMAHEMGHNFGMFHDDYSCKCPSTICVMDKALSFYIPTDFSSCSRLSYDKFFEDKLSNCLFNAPLPTDIISTPICGNQLVEMGEDCDCGTSEECTNICCDAKTCKIKATFQCALGECCEKCQFKKAGMVCRPAKDECDLPEMCNGKSGNCPDDRFQVNGFPCHHGKGHCLMGTCPTLREQCTELWGPGRRTNPFPCACAKENHFR

SEQ ID NO: 313 - DNA, 4011 bp, Homo sapiens
gggtagagacggggtttcaccgtgttagccaggatggtctggatctcctgacctcgtgatccacccacctcggcctcctaaagtgctgggattacagacatgagccaccgcgcccagccctattcatcccttttcaaaagtcagaccctaggaagctggagggaggtggggcatggttttacagtgaatttctgatttcactcagggtgataaatcagactcttggggaagcgggtggtggctctggacagcagcaggaatggggatccagttagcaacaaatccatggacctatgacaggctgaaagccaccccttctccatctttgggaggttgccaatgtctgatttaacactatccaatgaatgatcattgaaagtaaaaaataactatcaactagcagaaaatataaatggtaagcattagcacatatttcacatgtttatatttggctctcagattgacctataaaacaaagtctgggaaattctatatgatcctgaaaaaatgatacgctggtctggatggtagaataagttggagaaatgtttaagccaaaatgcagtcttaccaatgactttttattttattttattaattttcaggatttttggtatacaggtggtttttggttacatggaaaagttctttactggtgatttctgagattttagttcaccccttatcctgagcagtgtacactgttcccaatatgtagccttttatccctcaccccctctaagttcaagaagactatggtcctgcagaaagctttatatgtaattaacatatctttatctttatctttataggcagtagactcatcttttgaaacagattccattaagagtgaatgtgtaccctccctctagcctttattattactgtttttgctattacatgtgttagtgtatgtgaatttaatgcttaaaaatgtatcccattggctactatggcaaaaggttgactcataagagtttagcacgggttaagatctgaaagttttctcccagcctcttatcactggcgcagacttcacaattcatggaagccaccagtgagatgacattgcctcaggcagttactatttttatattctataactcgaggagctcagggtttcggaaatcattaaactttttttgtccttttaaagttggagacagcaattgtagacagccttccagtgggttatctttttgtgtctccttacctgtggagaagcctattagctgggatatgtagttaaatagctatatttatatatatccagggcaccccgaattcgggagagcttcccggagtcgaccttcctgctggctgctctgtgaccgcttcccggctctgccctcttggccgaagtgcccgctgccgggcgcgggcctcagacaatacaatggtgggtgaagagaagatgtctctaagaaaccggctgtcaaagtccagggaaaatcctgaggaagatgaagaccagagaaaccctgcaaaggagtccctagagacacctagtaatggtcgaattgacataaaacagttgatagcaaagaagataaagttgacagcagaggcagaggaattgaagccattttttatgaaggaagttggcagtcactttgatgattttgtgaccaatctcattgaaaagtcagcatcattagataatggtgggtgcgctctcacaaccttttctgttcttgaaggagagaaaaacaaccatagagcgaaggatttgagagcacctccagaacaaggaaagatttttattgcaaggcgctctctcttagatgaactgcttgaagtggaccacatcagaacaatatatcacatgtttattgccctcctcattctctttatcctcagcacacttgtagtagattacattgatgaaggaaggctggtgcttgagttcagcctcctgtcttatgcttttggcaaatttcctaccgttgtttggacctggtggatcatgttcctgtctacattttcagttccctattttctgtttcaacattgggccactggctatagcaagagttctcatccgctgatccgttctctcttccatggctttcttttcatgatcttccagattggagttctaggttttggaccaacatatgttgtgttagcatatacactgccaccagcttcccggttcatcattatattcgagcagattcgttttgtaatgaaggcccactcatttgtcagagagaacgtgcctcgggtactaaattcagctaaggagaaatcaagcactgttccaatacctacagtcaaccagtatttgtacttcttatttgctcctacccttatctaccgtgacagctatcccaggaatcccactgtaagatggggttatgtcgctatgaagtttgcacaggtctttggttgctttttctatgtgtactacatctttgaaaggctttgtgcccccttgtttcggaatatcaaacaggagcccttcagcgctcgtgttctggtcctatgtgtatttaactccatcttgccaggtgtgctgattctcttccttactttttttgcctttttgcactgctggctcaatgcctttgctgagatgttacgctttggtgacaggatgttctataaggattggtggaactccacgtcatactccaactattatagaacctggaatgtggtggtccatgactggctatattactatgcttacaaggactttctctggtttttctccaagagattcaaatctgctgccatgttagctgtctttgctgtatctgctgtagtacacgaatatgccttggctgtttgcttgagctttttctatcccgtgctcttcgtgctcttcatgttctttggaatggctttcaacttcattgtcaatgatagtcggaaaaagccgatttggaatgttctgatgtggacttctcttttcttgggcaatggagtcttactctgcttttattctcaagaatggtatgcacgtcggcactgtcctctgaaaaatcccacatttttggattatgtccggccacgttcctggacttgtcgttacgtgttttagaagcttggactttgtttcctccttgtcactgaagattgggtagctccctgatttggagccagctgtttccagttgttactgaagttatctgtgttatttggaccactccaggctttacagatgactcactccattcctaggtcacttgaagccaaactgttggaagttcactggagtcttgtacacttaagcagagcagaactttttttgtggggctgggtggggggagaagaccgactaacagctgaagtaatgacagattgttgctgggtcatatcagctttatcccttggtaattatatctgttttgtttcttgactctgtccaatcagagaataaacatcatagtttcttggccactgaattagccaaaacacttaggaagaaatcacttaaatacctctggcttagaaattttttcatgcacactgttggaatgtatgctaattgaacatgcaattggggaagaaaaaatgtagaatgatttttgctatttctagtagaaagaaaatgtctgttttccaaagataatgttatacatcctattttgtaatttttttgaaaaaagttcaatgttcagttttccttagtttttaccttgttttctctataggtcatgatttctgtgaagcaaaaagatgccttttaccatgaattcttgagtttacatcaataatattgtatattaaggggatcagaagtaggaaggaaaaaataagagatagcagaggaaaaagaaaaacatttcctcttataacttctgaagtaatttgtaaaaaagatttgtagagtcaatcatgtgtttaaattattttatcacaaacttaacatggaagatattcctttttaactttgtggtaacttctttgaagttatttagaaatatcctttggaacaattattttattgtctaataaatattgacttctcttgaattattttgcagactagtgagtctgtac

SEQ ID NO: 314 - protein, 550 aa, Homo sapiens
MVGEEKMSLRNRLSKSRENPEEDEDQRNPAKESLETPSNGRIDIKQLIAKKIKLTAEAEELKPFFMKEVGSHFDDFVTNLIEKSASLDNGGCALTTFSVLEGEKNNHRAKDLRAPPEQGKIFIARRSLLDELLEVDHIRTIYHMFIALLILFILSTLVVDYIDEGRLVLEFSLLSYAFGKFPTVVWTWWIMFLSTFSVPYFLFQHWATGYSKSSHPLIRSLFHGFLFMIFQIGVLGFGPTYVVLAYTLPPASRFIIIFEQIRFVMKAHSFVRENVPRVLNSAKEKSSTVPIPTVNQYLYFLFAPTLIYRDSYPRNPTVRWGYVAMKFAQVFGCFFYVYYIFERLCAPLFRNIKQEPFSARVLVLCVFNSILPGVLILFLTFFAFLHCWLNAFAEMLRFGDRMFYKDWWNSTSYSNYYRTWNVVVHDWLYYYAYKDFLWFFSKRFKSAAMLAVFAVSAVVHEYALAVCLSFFYPVLFVLFMFFGMAFNFIVNDSRKKPIWNVLMWTSLFLGNGVLLCFYSQEWYARRHCPLKNPTFLDYVRPRSWTCRYVF

SEQ ID NO: 315 - DNA, 2258 bp, Homo sapiens
cgccggcccgccttcccgggggttccgttatcatgtcgctgaggcagcgcctggcccagctggttggccgtctgcaggacccgcagaaagtggcccgtttccagcggctgtgcggggtggaagcgccgccgcgccgctcagcagaccggagggaggatgagaaagcggaggcgcctctcgccggagaccctcgactgcgagggcggcagccaggggcgcctggaggcccccagcctcccgggagcgaccgcaatcagtgcccggccaagccggacggcggcggcgcccccaacggcgtgcggaacgggctggcggccgagctgggcccggcctcgccgcggcgcgcgggcgctctgcgccgcaactcgctgacgggcgaggagggccagctggcccgcgtgagcaactggccgctctactgcctgttctgcttcggcacggagctgggcaacgaactcttctacatcctgttcttccccttctggatctggaacctggaccctctggtgggccggaggctcgtggtcatctgggtgctggtcatgtacctgggccagtgcaccaaggacatcatccgctggccgaggcccgcctcgccgcccgtggtcaagttggaggtcttctacaactctgagtacagcatgccctccacccatgccatgtccggcaccgccatccccatttctatggtcctcctcacctatggccgctggcagtaccctcttatatatggactgattcttattccctgctggtgttctctagtttgcctaagtagaatttacatgggaatgcactctattctggatattattgctggattcctatataccattttaatcttagctgtcttctatccatttgtggacctgattgacaacttcaaccaaactcacaaatatgctccattcatcatcatcgggcttcatttagctttggggatcttttctttcactcttgacacctggagcacatcccgaggagacacagccgagatactaggaagtggtgctggaattgcatgtggatctcatgttacttataacatgggtctagtattagatccttctctagatacattacctttagctgggccccccattactgtgactctgtttggaaaagccatattgcggatcctcatagggatggtatttgtactaataatcagagatgtaatgaaaaagatcaccattcctttagcctgcaaaatcttcaatataccgtgtgatgatattcgaaaagcaagacagcacatggaagttgaacttccttatcggtatattacctatggaatggttggtttctccatcacattttttgttccttacatatttttctttattggtatctcttgatggagaagtattgtttatgataagaaaggagggtatcagttactgatacccaaaaatatattccaggtaaagccaggtcagaattaggcttttgcaggaatttaacttaaataattatttaagtaaattcataagagtcagtgcattttatcattgcacatccagatactgttttaggtgagctgagctatttcgttactgagaaaatgataagtatccatttagaatgttcatgtaatgtttggagagttttgtattatggattccacttatatataatatatataaggtacataatatgcaattatatatctgatatatattatatataaaataatatacctaagtgtttttttaaactatgggagtgtattataaaatcaataataatatgcaaacagttgtgcctgtgtatttgaactacatacaggtatgttgttattaacagatatatttaacatttatttactatgggagccatttcctaattgaattgcgtaattactagaccagaatgcatatgctactatacattgatttactgcctgtttttacactgccattacctttcatgttatccatgatgttgaacatgggaggcatttttaatggaccaaatttttagaaaaattagtttttggatttttttttaagttctgtatactgttttgaatgaactttatttgcagctattctggatgtcagtttaataattcaggtactgaattttattgcttgctaattgtgcctttccgttgctaaattaagaaatgctatgtgtactgtgatgtaaaaataagacattaactttatcttaagttacatataatcaagcaaatattttaaaaaatgtatgtcagggtgacaggcataaaagtaaattacccttaactctttagc

SEQ ID NO: 316 - protein, 441 aa, Homo sapiens
MSLRQRLAQLVGRLQDPQKVARFQRLCGVEAPPRRSADRREDEKAEAPLAGDPRLRGRQPGAPGGPQPPGSDRNQCPAKPDGGGAPNGVRNGLAAELGPASPRRAGALRRNSLTGEEGQLARVSNWPLYCLFCFGTELGNELFYILFFPFWIWNLDPLVGRRLVVIWVLVMYLGQCTKDIIRWPRPASPPVVKLEVFYNSEYSMPSTHAMSGTAIPISMVLLTYGRWQYPLIYGLILIPCWCSLVCLSRIYMGMHSILDIIAGFLYTILILAVFYPFVDLIDNFNQTHKYAPFIIIGLHLALGIFSFTLDTWSTSRGDTAEILGSGAGIACGSHVTYNMGLVLDPSLDTLPLAGPPITVTLFGKAILRILIGMVFVLIIRDVMKKITIPLACKIFNIPCDDIRKARQHMEVELPYRYITYGMVGFSITFFVPYIFFFIGIS

SEQ ID NO: 317 - DNA, 2921 bp, Homo sapiens
gtcgacccacgcgtccgtgccagtctccggggactttcccaggggtggggcggcgtgtccgggcccccggcacttcctcgtcctcggcccgggtgccctgcccccgtccaggagccctaggagtgctacggggggccggagccttgcccgggccgctgccccgtccctggattcggggctggacgcagcaagcggggcgctgtgtccccaagctccccgtcctcgcagcgggcacaggcaggggctgagctaccctcatggaagggagaggaccgtaccggatctacgaccctgggggcagcgtgccctcaggagaggcatccgcagcttttgagcgcctagtgaaggagaattcccggctgaaggaaaaaatgcaagggataaagatgttaggggagcttttggaagagtcccagatggaagcgaccaggctccggcagaaggcagaggagctagtgaaggacaacgagctgctcccaccaccttctccctccttgggctccttcgaccccctggctgagctcacaggaaaggactcaaatgtcacagcatctcccacagcccctgcatgccccagtgacaagccagcaccagtccagaagcctccatccagtggcacctcctctgaatttgaagtggtcactcctgaggagcagaattcaccagagagcagcagccatgccaatgcgatggcgctgggccccctgccccgtgaggacggcaacctgatgctgcacctgcagcgcctggagaccacgctgagtgtgtgtgccgaggagccggaccacggccagctcttcacccacctgggccgcatggccctggagttcaaccgactggcatccaaggtgcacaagaatgagcagcgcacctccattctgcagaccctgtgtgagcagcttcggaaggagaacgaggctctgaaggccaagttggataagggcctggaacagcgggatcaggctgccgagaggctgcgggaggaaaatttggagctcaagaagttgttgatgagcaatggcaacaaagagggtgcgtctgggcggccaggctcaccgaagatggaagggacaggcaagaaggcagtggctggacagcagcaggctagtgtgacggcaggtaaggtcccagaggtggtggccttgggcgcacccgagaagaaggtgaagatgctggagcagcagcgcagtgagctgctggaagtgaacaagcagtgggaccagcatttccggtccatgaagcagcagtatgagcagaagatcactgagctgcgtcagaagctggctgatttgcagaagcaggtgactgacctggaggccgagcgggagcagaagcagcgtgactttgaccgcaagctcctcctggccaagtccaagattgaaatggaggagaccgacaaggagcagctgacagcagaggccaaggagctgcgccaaaaggtcaagtacctgcaggatcagctgagcccactcacccgacagcgtgagtaccaggaaaaggagatccagcggctcaacaaggccctggaggaagcactgagcatccaaaccccgccatcatctccaccaacagcatttgggagcccagaaggagcaggggccctcctaaggaaacaggagctggtcacgcagaatgagttgctgaaacagcaggtgaagatcttcgaggaggacttccagagggagcgcagtgatcgtgagcgcatgaatgaggagaaggaagagctgaagaagcaagtggagaagctgcaggcccaggtcaccctgtcaaatgcccagctaaaagcattcaaagatgaggagaaggcaagagaagccctcagacagcagaagaggaaagcaaaggcctcaggagagcgttaccatgtggagccccacccagaacatctctgcggggcctacccctacgcctacccgcccatgccagccatggtgccacaccatggcttcgaggactggtcccagatccgctacccccctccccccatggccatggagcacccgcccccactccccaactcgcgcctcttccatctgccggaatacacctggcgtctaccctgtggaggggttcgaaatccaaatcagagctcccaagtgatggaccctcccacagccaggcctacagaaccagagtctccaaaaaatgaccgtgaggggcctcagtgagaccagattgtgtcatttggctccaccttcatcttgcagagccagctgatctcaattgccaaaaactagaagccacttgcacggtgtggccagagcctcagctggatgagaggctgagatgggtggccagcttgtacaccagtccctgaactgagctgtttacaggactggggaggctccacccagaaggctttcatttgtactctgctgggagtgactgggaaaaactccttccctgctgctgagtggagagaggcctcatccggctttgacccccatccttgcagaagcctccaggagcagcaatcctaagagtgggaggcagccaagacccccttccttcaaaacctcccggaagtggtttcaggccctctagttgccatgaccaatttgtgtgtgtgtttaatttttgcttcaagctctgtagcaggacctgccccacgcacacccctacccctctgtgaggagctgtgggaagtgtgggtttgtctccagaacagaagagaatgatggatattctggctctggggccctctccaccaccactcacagtagccttgctgaagccatcacagatgggagaaggccatgccagccacgtccgccgaggggcgccagcctgaagctgccaggccctgaggttcagaccctggaccccatagctggaggcctgtggtgccagaagcccagattagggtggctgtccatccctggatagctatttgcacgaatcatggacataaatccaagttg

SEQ ID NO: 318 - protein, 636 aa, Homo sapiens
MEGRGPYRIYDPGGSVPSGEASAAFERLVKENSRLKEKMQGIKMLGELLEESQMEATRLRQKAEELVKDNELLPPPSPSLGSFDPLAELTGKDSNVTASPTAPACPSDKPAPVQKPPSSGTSSEFEVVTPEEQNSPESSSHANAMALGPLPREDGNLMLHLQRLETTLSVCAEEPDHGQLFTHLGRMALEFNRLASKVHKNEQRTSILQTLCEQLRKENEALKAKLDKGLEQRDQAAERLREENLELKKLLMSNGNKEGASGRPGSPKMEGTGKKAVAGQQQASVTAGKVPEVVALGAPEKKVKMLEQQRSELLEVNKQWDQHFRSMKQQYEQKITELRQKLADLQKQVTDLEAEREQKQRDFDRKLLLAKSKIEMEETDKEQLTAEAKELRQKVKYLQDQLSPLTRQREYQEKEIQRLNKALEEALSIQTPPSSPPTAFGSPEGAGALLRKQELVTQNELLKQQVKIFEEDFQRERSDRERMNEEKEELKKQVEKLQAQVTLSNAQLKAFKDEEKAREALRQQKRKAKASGERYHVEPHPEHLCGAYPYAYPPMPAMVPHHGFEDWSQIRYPPPPMAMEHPPPLPNSRLFHLPEYTWRLPCGGVRNPNQSSQVMDPPTARPTEPESPKNDREGPQ

SEQ ID NO: 319 - DNA, 2216 bp, Homo sapiens
ggaagctcagcagtgtccactgtcgccattccttggccatagaaaacaatgtatttgaattttgatgtaagcatagcaaattgaagatgaagatgacacgttgatttcttgtttgaaattaaccaagtcccgagaaaagaaagtgaatagtgttagcacgaggaggaaggaagaaatggagattagattggatactctttctgcatcactgggtagatccagcactttaaatgactgcaacttggaagataaattagcttggtatgaaggtgaagcttacatgtggcatcactggaagccttttcctgaaaaccctctctggacatgtcttgatttccaaatagcacaagttggaccctgggactactgctcctcttgtattcgccacacacgtctcaagtcttcctgctcagatatggatctcctacattcatggcgaagcagcagttttgggaatttcgatcgttttcggaataattctttatcaaaaccagatgattcaactgaggcacatgaaggagatcccacaaatggaagtggagaacaaagtaaaacttcaaataatggaggcggtttgggtaaaaaaatgagagctatttcatggacaatgaagaaaaaagtgggtaaaaagtacatcaaagccctttctgaggaaaaggatgaggaagatggagagaatgcccacccatatagaaacagtgaccctgtgattgggacccacacagagaaggtgtccctcaaagccagtgactccatggatagtctctacagtggacagagctcatcaagtggcataacaagctgttcagatggtacaagtaaccgggacagctttcgactggatgacgatggcccctattcaggaccattctgtggccgtgccagagtgcatacggatttcacgccaagtccctatgacactgactccctcaaaatcaagaaaggagacatcatagacattatttgcaaaacaccaatggggatgtggacaggaatgttgaacaataaagtgggaaacttcaaattcatttatgtggatgtcatctcagaagaggaagcagcccccaagaaaataaaggcaaaccgaaggagtaacagcaaaaaatccaagactctgcaggagttcctagagaggattcatctgcaggaatacacctcaacacttttgctcaatggttatgagactctagaagatttaaaagatataaaagagagtcacctcattgaattaaatattgaaaacccagatgacagaagaaggttactatcagctgctgaaaacttccttgaagaagaaattattcaagagcaagaaaatgaacctgagcccctatccttgagctcagacatctccttaaataagtcacagttagatgactgcccaagggactctggttgctatatctcatcaggaaattcagataatggcaaagaggatctggagtctgaaaatctgtctgacatggtacataagattattatcacagagccaagtgactgaacacgcattcccaactatatatctacagatgcattccattttaactcttcttgagctaaaacgtcaaataggagaggaagataagataaatatttgtaaataaaacctaaagtttaaatgttttaatctgaataattgtacataaaattttgtatctctaacattccaaattactgtcaataaaatatatatttattattttaaatgctatgtgttaatatttcacttgcttgtattagaaaggcaaaatgtaagactttggtatgtgtgacatatgctttatttggctttattttacaagtacagtatctgcaaaaaacaaagtaaccttttttcatacctgccagttttgaatttatatatgttattgaacaaatagtaatagaggattcgctgttgaaacaagttgtccaagcaatgttatattcatttttatacttattgggaaagtgtgagttaatattggacacattttatcctgatccacagtggagttttagtaattatattttgttgatttcttcattttgttttctggtataaaagtagagataatgtgtagtcacttctgatttagtgaaaccaattgtaataattgtggaaatgttttgtctttaagtgtaaatattttaaaatttgacataccctaatgttaataataaaaagaactatttgcataaaaaaaaaaaaaaaaaaaaaaaaaaaaaaaaaaaaa

SEQ ID NO: 320 - protein, 441 aa, Homo sapiens
MEIRLDTLSASLGRSSTLNDCNLEDKLAWYEGEAYMWHHWKPFPENPLWTCLDFQIAQVGPWDYCSSCIRHTRLKSSCSDMDLLHSWRSSSFGNFDRFRNNSLSKPDDSTEAHEGDPTNGSGEQSKTSNNGGGLGKKMRAISWTMKKKVGKKYIKALSEEKDEEDGENAHPYRNSDPVIGTHTEKVSLKASDSMDSLYSGQSSSSGITSCSDGTSNRDSFRLDDDGPYSGPFCGRARVHTDFTPSPYDTDSLKIKKGDIIDIICKTPMGMWTGMLNNKVGNFKFIYVDVISEEEAAPKKIKANRRSNSKKSKTLQEFLERIHLQEYTSTLLLNGYETLEDLKDIKESHLIELNIENPDDRRRLLSAAENFLEEEIIQEQENEPEPLSLSSDISLNKSQLDDCPRDSGCYISSGNSDNGKEDLESENLSDMVHKIIITEPSD

SEQ ID NO: 321 - DNA, 2745 bp, Homo sapiens
ggcccagctgctgagaggagttgcctgagagtgacctttgcatctgcctgtccagccagcatggaaccaaagcggatcagagagggctaccttgtgaagaaggggagcgtgttcaatacgtggaaacccatgtgggttgtattgttagaagatggaattgaattctataagaagaaaagtgacaacagccccaaaggaatgatcccgctgaaagggagcactctgactagcccttgtcaagactttggcaaaaggatgtttgtgtttaagatcactacgaccaaacagcaggaccacttcttccaggcagccttcctggaggagagagatgcctgggttcgggatatcaataaggccattaaatgcattgaaggaggccagaaatttgccaggaaatctaccaggaggtccattcgactgccagaaaccattgacttaggtgccttatatttgtccatgaaagacactgaaaaaggaataaaagaactgaatctagagaaggacaagaagatttttaatcactgcttcacaggtaactgcgtcattgattggctggtatccaaccagtctgttaggaatcgccaggaaggcctcatgattgcttcatcgctgctcaatgaggggtatctgcagcctgctggagacatgtccaagagtgcagtggatggaactgctgaaaaccctttcctggacaaccctgatgccttctactactttccagacagtgggttcttctgtgaagagaattccagtgatgatgatgtgattctgaaagaagaattcagaggggtcattatcaagcagggatgtttactgaagcaggggcatagaaggaaaaactggaaagtgaggaagttcatcttgagagaagaccctgcctacctgcactactatgaccctgctggggcagaagatcccctgggagcaattcacttgagaggctgtgtggtgacttcagtggagagcaactcaaatggcaggaagagtgaggaagagaacctttttgagatcatcacagcagatgaagtgcactatttcttgcaagcagccacccccaaggagcgcacagagtggatcaaagccatccagatggcctcccgaactgggaagtaaagagactcctgcattcctcctcccctcctgagggaagcccatggacaagctcagtccaggacctgtccacttctgtgacaaatcaacgggaaacagcccaggggtgggaagttttcatttgcaggggggtctgaatgtaactcaccatgtggtgtgcaaggttcccctgcattgtattgctcactgcagcccctctgcccctatccatgacccccaagcagatataacaagctgtgcagcctcagtaggctgcttgccctctccagcctcagggcctcttctggaaaatgaagaaattcaactagtagattcctgaggtccccctagcttaaaaaaaaaaaaatctgccccatgattctaacactcgcagtagtgatagtgtatctagttgttctgctggtgtccttccttggctaagtcttggccttcagttatcttcaaatgtaccagaacctgagccaacgcctccctgtgaaactgttgctgatctgtagtacagtaccaggaagaaacctcttttgttctctttagacatcttctacttgctcttggccttgagatcgtgtaacaaaatgaaggagggctctcttctttcttcctcatcctactcaaaaacttcccgagagcagtggtggttttgagggttttgacttctattacttttggcagcctggaaagttgtgtcttctgggaaagagacccggggaggccaggagtagctgagggtcctttctgtgcccttaaaccgcccagaggagccctattccactctggttttaggctgatctgagagggtctccctttgttcctttctggagcatttctctaacgtttattacaattaggagggggaccccacatctgtgagattctgtttcatttgaggtttacagaaaaaaaaaagtggccagatgtgttccccccatgggtgagaggcctgggcaactgcctggtgaatgtgtcttgcggcagctgcagcaagtggaggggctgaactactggccagctcactggatgatgggttaatacaacaactgcactgtaaggactcagagccacacagaacttctgagaggggctgttagcattgcgcagcatcttcagttctccagtaaatgatattgcgttcgtgcctcagctttaagcacaagtagcagcagctcctgcttgagttctgagggcatcatggccctatgattaaccagagtgatctaacctagactaaaattgggaacttatttgcaatttttgaccctgaccactaactagtgattcttctccaaaattgagaaagacagcacccattgaaacagatatgtgtgtgaaagtatatttttcaattccagatttttaattttaaggctccaggaaagaaaggagagtagaacatttttcctcattttatcaaatcctctcttgccctccctcaattcccctgtaacattcctgaagctgttcccactcccagatggttttatcaatagcctagaggtaaagaactgtctttttctctgattctttaataaattatctttatagaatatgcacaagtttttctacactcagtgttaaagtatttattaatgggaagtcaacttaatgttttgaaataaatatatgactctgtttaat

SEQ ID NO: 322 - protein, 350 aa, Homo sapiens
MEPKRIREGYLVKKGSVFNTWKPMWVVLLEDGIEFYKKKSDNSPKGMIPLKGSTLTSPCQDFGKRMFVFKITTTKQQDHFFQAAFLEERDAWVRDINKAIKCIEGGQKFARKSTRRSIRLPETIDLGALYLSMKDTEKGIKELNLEKDKKIFNHCFTGNCVIDWLVSNQSVRNRQEGLMIASSLLNEGYLQPAGDMSKSAVDGTAENPFLDNPDAFYYFPDSGFFCEENSSDDDVILKEEFRGVIIKQGCLLKQGHRRKNWKVRKFILREDPAYLHYYDPAGAEDPLGAIHLRGCVVTSVESNSNGRKSEEENLFEIITADEVHYFLQAATPKERTEWIKAIQMASRTGK

SEQ ID NO: 323 - DNA, 1080 bp, Homo sapiens
atgtcaagacgaagtagccgtttacaagctaagcagcagccccagcccagccagacggaatccccccaagaagcccagataatccaggccaagaagaggaaaactacccaggatgtcaaaaaaagaagagaggaggtcaccaagaaacatcagtatgaaattaggaattgttggccacctgtattatctggggggatcagtccttgcattatcattgaaacacctcacaaagaaataggaacaagtgatttctccagatttacaaattacagatttaaaaatctttttattaatccttcacctttgcctgatttaagctggggatgttcaaaagaagtctggctaaacatgttaaaaaaggagagcagatatgttcatgacaaacattttgaagttctgcattctgacttggaaccacagatgaggtccatacttctagactggcttttagaggtatgtgaagtatacacacttcatagggaaacattttatcttgcttacgtcactgatggtgcttgcagtgaagaggatatcttaaggatggaactcattatattaaaggctttaaaatgggaactttgtcctgtaacaatcatctcctggctaaatctctttctccaagttgatgctcttaaagatgctcctaaagttcttctacctcagtattctcaggaaacattcattcaaatagctcagcttttagatctgtgtattctagccattgattcattagagttccagtacagaatactgactgctgctgccttgtgccattttacctccattgaagtggttaagaaagcctcaggtttggagtgggacagtatttcagaatgtgtagattggatggtaccttttgtcaatgtagtaaaaagtactagtccagtgaagctgaagacttttaagaagattcctatggaagacagacataatatccagacacatacaaactatttggctatgctggaggaagtaaattacataaacaccttcagaaaagggggacagttgtcaccagtgtgcaatggaggcattatgacaccaccgaagagcactgaaaaaccaccaggaaaacactaa

SEQ ID NO: 324 - protein, 359 aa, Homo sapiens
MSRRSSRLQAKQQPQPSQTESPQEAQIIQAKKRKTTQDVKKRREEVTKKHQYEIRNCWPPVLSGGISPCIIIETPHKEIGTSDFSRFTNYRFKNLFINPSPLPDLSWGCSKEVWLNMLKKESRYVHDKHFEVLHSDLEPQMRSILLDWLLEVCEVYTLHRETFYLAYVTDGACSEEDILRMELIILKALKWELCPVTIISWLNLFLQVDALKDAPKVLLPQYSQETFIQIAQLLDLCILAIDSLEFQYRILTAAALCHFTSIEVVKKASGLEWDSISECVDWMVPFVNVVKSTSPVKLKTFKKIPMEDRHNIQTHTNYLAMLEEVNYINTFRKGGQLSPVCNGGIMTPPKSTEKPPGKH

SEQ ID NO: 325 - DNA, 2214 bp, Homo sapiens
gttgactggaggcggaggttgcagtgagccgagatcgccccactgcactccagcctggtgactccgtctcaaaaaaaaggggaggggggcgggggagagttgaaagcttaatatgtactttgggggctattaaagcaaacatttcgactaaaggggcgaatcctcgaattgtgcgatcaagcacccgagaggagagttggggggggtcaggaggggtgggggctccagggaacgcccgggggcctgggccggggtctcgcggggcccttccggaaggatcgcggcccccgaaggtgggcgtcccgcggggctccagtctccaggacgttccgggaggctccgcgctctgggaggccggctgcgtggggtccccgcgctgcagccgcagaggccccccagggccgcggttcccggagcgggaaagtcccgcgcgggggcggtggcctcgggggcgggacggggcgggggcgggggcgcgggcggccgagccgaatcccctccaccgggacgccccgctgccgctcgggaagaggcgggccctgcgcgccctgcgctcgccatggcggtttgggcggcgacgtgagcggctccgcggaccccgagcggggccccggccgcgacctgagccgccgccgagcgcccggggccatgcgaccgacgctgctgtggtcgctgctgctgctgctcggagtcttcgccgccgccgccgcggccccgccagaccctctttcccagctgcccgctcctcagcacccgaagattcgcctgtacaacgcagagcaggtcctgagttgggagccagtggccctgagcaatagcacgaggcctgttgtctaccgagtgcagtttaaatacaccgacagtaaatggttcacggccgacatcatgtccataggggtgaattgtacacagatcacagcaacagagtgtgacttcactgccgccagtccctcagcaggcttcccaatggatttcaatgtcactctacgccttcgagctgagctgggagcactccattctgcctgggtgacaatgccttggtttcaacactatcggaatgtgactgtcgggcctccagaaaacattgaggtgaccccaggagaaggctccctcatcatcaggttctcctctccctttgacatcgctgatacctccacggcctttttttgttattatgtccattactgggaaaaaggaggaatccaacaggtcaaaggccctttcagaagcaactccatttcattggataacttaaaaccctccagagtgtactgtttacaagtccaggcacaactgctttggaacaaaagtaacatctttagagtcgggcatttaagcaacatatcttgctacgaaacaatggcagatgcctccactgagcttcagcaagtcatcctgatctccgtgggaacattttcgttgctgtcggtgctggcaggagcctgtttcttcctggtcctgaaatatagaggcctgattaaatactggtttcacactccaccaagcatcccattacagatagaagagtatttaaaagacccaactcagcccatcttagaggccttggacaaggacagctcaccaaaggatgacgtctgggactctgtgtccattatctcgtttccggaaaaggagcaagaagatgttctccaaacgctttgaaccaaagcatgggcctagcccactggctccctggaagagatcaagccatcggagctgctagagttctgtctggactttccagagaccagtattcccttttgctgcctctaaaaggcctgtccctgcagacatgagagacagcaggtctcatgggggtgacaagcttttttttttttttcttaaagaattttcaaaatcaaattccagaatgattttacggagatatcccaggaaaattaaggcttctcttaaacactaaaaaggcatgtaattgcttgttagcaaaatggatatgacacatctctgatacttttttcattattggttgggctgagcagtcagaagacctggtcgtcgtcttgactttggcaaatgagccggagccccttgggcaggtcacacaacctgtcccagcgagggacactgagtggcccttcatgtacatccatggtgtgctggcttaaaatgtaattaatcttgtaaatatactcctagtaatttaagattttgtttttaaactggaaataaaagattgtatagtgcatgtttttt

SEQ ID NO: 326 - protein, 337 aa, Homo sapiens
MRPTLLWSLLLLLGVFAAAAAAPPDPLSQLPAPQHPKIRLYNAEQVLSWEPVALSNSTRPVVYRVQFKYTDSKWFTADIMSIGVNCTQITATECDFTAASPSAGFPMDFNVTLRLRAELGALHSAWVTMPWFQHYRNVTVGPPENIEVTPGEGSLIIRFSSPFDIADTSTAFFCYYVHYWEKGGIQQVKGPFRSNSISLDNLKPSRVYCLQVQAQLLWNKSNIFRVGHLSNISCYETMADASTELQQVILISVGTFSLLSVLAGACFFLVLKYRGLIKYWFHTPPSIPLQIEEYLKDPTQPILEALDKDSSPKDDVWDSVSIISFPEKEQEDVLQTL

SEQ ID NO: 327 - DNA, 428 bp, Homo sapiens
atgtctcttgtcagctgtctttcagaagacctggtggggcaagtccgtgggcatcatgttgaccgagctggagaaagccttgaactctatcatcgacgtctaccacaagtactccctgataaaggggaatttccatgccgtctacagggatgacctgaagaaattgctagagaccgagtgtcctcagtatatcaggaaaaagggtgcagacgtctggttcaaagagttggatatcaacactgatggtgcagttaacttccaggagttcctcattctggtgataaagatgggcgtggcagcccacaaaaaaagccatgaagaaagccacaaagagtagctgagttactgggcccagaggctgggcccctggacatgtacctgcagaataataaagtcatcaatacctcaaaaaaaaaaaaaaaaaaaaa

SEQ ID NO: 328 - protein, 93 aa, Homo sapiens
MLTELEKALNSIIDVYHKYSLIKGNFHAVYRDDLKKLLETECPQYIRKKGADVWFKELDINTDGAVNFQEFLILVIKMGVAAHKKSHEESHKE

SEQ ID NO: 329 - DNA, 576 bp, Homo sapiens
aaacactctgtgtggctcctcggctttgggacagagtgcaagacgatgacttgcaaaatgtcgcagctggaacgcaacatagagaccatcatcaacaccttccaccaatactctgtgaagctggggcacccagacaccctgaaccagggggaattcaaagagctggtgcgaaaagatctgcaaaattttctcaagaaggagaataagaatgaaaaggtcatagaacacatcatggaggacctggacacaaatgcagacaagcagctgagcttcgaggagttcatcatgctgatggcgaggctaacctgggcctcccacgagaagatgcacgagggtgacgagggccctggccaccaccataagccaggcctcggggagggcaccccctaagaccacagtggccaagatcacagtggccacggccatggccacagtcatggtggccacggccacaggccactaatcaggaggccaggccaccctgcctctacccaaccagggccccggggcctgttatgtcaaactgtcttggctgtggggctaggggctggggccaaataaagtctcttcctccaa

SEQ ID NO: 330 - protein, 114 aa, Homo sapiens
MTCKMSQLERNIETIINTFHQYSVKLGHPDTLNQGEFKELVRKDLQNFLKKENKNEKVIEHIMEDLDTNADKQLSFEEFIMLMARLTWASHEKMHEGDEGPGHHHKPGLGEGTP

SEQ ID NO: 331 - DNA, 3502 bp, Homo sapiens
gcgcgcagctggttcccgctctgcagcgcaacgcctgaggcagtgggcgcgctcagtcccgggaccaggcgttctctcctctcgcctctgggcctgggacccgcaaagcggcgatggagcggaggtcgcggaggaagtcgcggcgcaacgggcgctcgaccgcgggcaaggccgccgcgacccagcccgcgaagtctccgggcgcacagctctggctctttcccagcgccgcgggcctccaccgcgcgctgctccggagggtggaggtgacgcgccaactctgctgctcgccggggcgcctcgcggtcttggaacgcggcggggcgggcgtccaggttcaccagctgctcgccgggagcggcggcgcccggacgccgaaatgcattaaattaggaaaaaacatgaagatacattccgtggaccaaggagcagagcacatgctgattctctcatcagatggaaaaccatttgagtatgacaactatagcatgaaacatctaaggtttgaaagcattttacaagaaaaaaaaataattcagatcacatgtggagattaccattctcttgcactctcaaaaggcggtgagctttttgcctggggacagaacctgcatgggcagcttggagttggaaggaaatttccctcaaccaccacaccacagattgtggagcacctcgcaggagtacccttggctcagatttctgccggagaagcccacagcatggccttatccatgtctggcaacatttattcatggggaaaaaatgaatgtggacaactaggcctgggccacactgagagtaaagatgatccatcccttattgaaggactagacaatcagaaagttgaatttgtcgcttgtggtggctctcacagtgccctactcacacaggatgggctgctgtttactttcggtgctggaaaacatgggcaacttggtcataattcaacacagaatgagctaagaccctgtttggtggctgagcttgttgggtatagagtgactcagatagcatgtggaaggtggcacacacttgcctatgtttctgatttgggaaaggtcttttcctttggttctggaaaagatggacaactgggaaatggtggaacacgtgaccagctgatgccgcttccagtgaaagtatcatcaagtgaagaactcaaacttgaaagccatacctcagaaaaggagttaataatgattgctggagggaatcaaagcattttgctctggataaagaaagagaattcatatgttaatctgaagaggacaattcctactctgaatgaagggactgtaaagagatggattgctgatgtggagactaaacggtggcagagcacaaaaagggaaatccaagagatattttcatctcctgcttgtctaactggaagttttttaaggaaaagaagaactacagaaatgatgcctgtttatttggacttaaataaagcaagaaacatcttcagggagttaacccaaaaggactggattactaacatgataaccacctgcctcaaagataatctgctcaaaagacttccatttcattctccaccccaagaagctttagaaattttcttccttctcccagaatgtcctgtgatgcatatttccaacaactgggagagccttgtggttccatttgcaaaggttgtttgtaaaatgagtgaccagtcttcactggttctggaagagtattgggcaactctgcaagaatccactttcagcaaactggtccagatgtttaaaacagccgtcatatgccagttggattactgggatgaaagtgctgaggagaatggtaatgttcaagctctcctagaaatgttgaagaagctgcacagggtaaaccaggtgaaatgtcaactacctgaaagtattttccaagtagacgaactcttgcaccgtctcaatttttttgtagaagtatgcagaaggtacttgtggaaaatgactgtggacgcttcagaaaatgtacaatgctgcgtcatattcagtcactttccatttatctttaataatctgtcgaaaattaaactactacatacagacacacttttaaaaatagagagtaaaaaacataaagcttatcttaggtcggcagcaattgaggaagaaagagagtctgaattcgctttgaggcccacgtttgatctaacagtcagaaggaatcacttgattgaggatgttttgaatcagctaagtcaatttgagaatgaagacctgaggaaagagttatgggtttcatttagtggagaaattgggtatgacctcggaggagtcaagaaagagttcttctactgtctgtttgcagagatgatccagccggaatatgggatgttcatgtatcctgaaggggcttcctgcatgtggtttcctgtcaagcctaaatttgagaagaaaagatacttcttttttggggttctatgtggactttccctgttcaattgcaatgttgccaacctccctttcccactggcactgtttaagaaacttttggaccaaatgccatcattggaagacttgaaagaactcagtcctgatttgggaaagaatttgcaaacacttctggatgatgaaggtgataactttgaggaagtattttacatccattttaatgtgcactgggacagaaacgacacaaacttaattcctaatggaagtagcataactgtcaaccagactaacaagagagactatgtttctaagtatatcaattacattttcaacgactctgtaaaggcggtttatgaagaatttcggagaggattttataaaatgtgcgacgaagacattatcaaattattccaccccgaagaactgaaggatgtgattgttggaaatacagattatgattggaaaacatttgaaaagaatgcacgttatgaaccaggatataacagttcacatcccaccatagtgatgttttggaaggctttccacaaattgactctggaagaaaagaaaaaattccttgtatttcttacaggaactgacagactacaaatgaaagatttaaataatatgaaaataacattttgctgtcctgaaagttggaatgaaagagaccctataagagcactgacatgtttcagtgtcctcttcctccctaaatattctacaatggaaacagttgaagaagcgcttcaagaagccatcaacaacaacagaggatttggctgaccagcttgcttgtccaacagccttattttgttgttgttatcgttgttgttgttgttgttgttgttgtttctctactttgttttgttttaggcttttagcagcctgaagccatggtttttcatttctgtctctagtgataagcaggaaagagggatgaagaagagggtttactggccggttagaacccgtgactgtattctctcccttggatacccctatgcctacatcatattccttacctcttttgggaaatatttttcaaaaataaaataaccgaaaaactaaaaaaagaaaaaaaaaaaaaaaaaaaaaaa

SEQ ID NO: 332 - protein, 1024 aa, Homo sapiens
MERRSRRKSRRNGRSTAGKAAATQPAKSPGAQLWLFPSAAGLHRALLRRVEVTRQLCCSPGRLAVLERGGAGVQVHQLLAGSGGARTPKCIKLGKNMKIHSVDQGAEHMLILSSDGKPFEYDNYSMKHLRFESILQEKKIIQITCGDYHSLALSKGGELFAWGQNLHGQLGVGRKFPSTTTPQIVEHLAGVPLAQISAGEAHSMALSMSGNIYSWGKNECGQLGLGHTESKDDPSLIEGLDNQKVEFVACGGSHSALLTQDGLLFTFGAGKHGQLGHNSTQNELRPCLVAELVGYRVTQIACGRWHTLAYVSDLGKVFSFGSGKDGQLGNGGTRDQLMPLPVKVSSSEELKLESHTSEKELIMIAGGNQSILLWIKKENSYVNLKRTIPTLNEGTVKRWIADVETKRWQSTKREIQEIFSSPACLTGSFLRKRRTTEMMPVYLDLNKARNIFRELTQKDWITNMITTCLKDNLLKRLPFHSPPQEALEIFFLLPECPVMHISNNWESLVVPFAKVVCKMSDQSSLVLEEYWATLQESTFSKLVQMFKTAVICQLDYWDESAEENGNVQALLEMLKKLHRVNQVKCQLPESIFQVDELLHRLNFFVEVCRRYLWKMTVDASENVQCCVIFSHFPFIFNNLSKIKLLHTDTLLKIESKKHKAYLRSAAIEEERESEFALRPTFDLTVRRNHLIEDVLNQLSQFENEDLRKELWVSFSGEIGYDLGGVKKEFFYCLFAEMIQPEYGMFMYPEGASCMWFPVKPKFEKKRYFFFGVLCGLSLFNCNVANLPFPLALFKKLLDQMPSLEDLKELSPDLGKNLQTLLDDEGDNFEEVFYIHFNVHWDRNDTNLIPNGSSITVNQTNKRDYVSKYINYIFNDSVKAVYEEFRRGFYKMCDEDIIKLFHPEELKDVIVGNTDYDWKTFEKNARYEPGYNSSHPTIVMFWKAFHKLTLEEKKKFLVFLTGTDRLQMKDLNNMKITFCCPESWNERDPIRALTCFSVLFLPKYSTMETVEEALQEAINNNRGFG

SEQ ID NO: 333 - DNA, 466 bp, Homo sapiens
accactgctggctttttgctgtagctccacattcctgtgcattgaggggttaacattaggctgggaagatgacaaaacttgaagagcatctggagggaattgtcaatatcttccaccaatactcagttcggaaggggcattttgacaccctctctaagggtgagctgaagcagctgcttacaaaggagcttgcaaacaccatcaagaatatcaaagataaagctgtcattgatgaaatattccaaggcctggatgctaatcaagatgaacaggtcgactttcaagaattcatatccctggtagccattgcgctgaaggctgcccattaccacacccacaaagagtaggtagctctctgaaggctttttacccagcaatgtcctcaatgagggtcttttctttccctcaccaaaacccagccttgcccgtggggagtaagagttaataaacacactcacgaaaagtt

SEQ ID NO: 334 - protein, 92 aa, Homo sapiens
MTKLEEHLEGIVNIFHQYSVRKGHFDTLSKGELKQLLTKELANTIKNIKDKAVIDEIFQGLDANQDEQVDFQEFISLVAIALKAAHYHTHKE

SEQ ID NO: 335 - DNA, 3485 bp, Homo sapiens
ccctaccgcccccaattccgccctgcccccgccgcggcggcgctagccgccactgagggaccgaccctataaaggccgctccgcgaggggtgcgcagcattcggcagagggcgcttcgacgggctgggctgtgcgcctgcgcagtgtgggtcgctcccgattccctgccccggccggccccgcctcggctccgcaccctcgccccgctctcagccgccgctctgccccgcagcagccagccccgtgtccggcagtatgttcagctgggtcagcaaggatgcccgccgcaagaaggagccggagctcttccagacggtggccgaggggctgcggcagctgtacgcgcagaagctgctacccctggaggagcactaccgcttccacgagttccactcgcccgcrctggaggacgctgacttcgacaacaagcctatggtgctcctcgtgrggcagtacagcacgggcaagaccaccttcatccgacacctgatcgagcaggacttcccggggatgcgcatcgggcccgagcccaccaccgactccttcatcgccgtcatgcacggccccactgagggcgtggtgccgggcaacgcgctcgtggtggacccgcggcgccccttccgcaagctcaacgcgtttggcaacgctttcctcaacaggttcatgtgtgcccagctgcccaaccccgtcctggacagcatcagcatcatcgacacccccgggatcctgtctggagagaagcagcggatcagcagaggctatgactttgcagccgtcctggagtggttcgcggagcgtgtggaccgcatcatcctgctcttcgacgcccacaagctggacatctccgatgagttctcggaagtgatcaaggctctgaagaaccatgaggacaagatccgcgtggtgctgaacaaggcagaccagatcgagacgcagcagctgatgcgggtgtacggggccctcatgtggtccctgggcaagatcatcaacacccccgaggtggtcagggtctacatcggctccttctggtcccacccgctcctcatccccgacaaccgcaagctctttgaggccgaggagcaggacctcttcaaggacatccagtcactgccccgaaacgccgccctcaggaagctcaatgacctgatcaagcgggcacggctggccaaggttcacgcctacatcatcagctccctcaagaaagagatgcccaatgtctttggtaaagagagcaaaaagaaagagctggtgaacaacctgggagagatctaccagaagattgagcgcgagcaccagatctcccctggggacttcccgagcctccgcaagatgcaggaactcctgcagacccaggacttcagcaagttccaggcgctgaagcccaagctgctggacacggtggatgacatgctggccaacgacatcgcgcggctgatggtgatggtgcggcaggaggagtccctgatgccttcccaggtggtcaagggcggcgcctttgacggcaccatgaacgggccgttcgggcacggctacggcgagggggccggcgagggcatccacgacgtggagtgggtggtgggcaaggacaagcccacctacgacgagatcttctacacgctgtcccctgtcaacggcaagatcacgggcgccaacgccaagaaggagatggtgaagtccaagctccccaacaccgtgctagggaagatctggaagctggccgacgtggacaaggacgggctgctggacgacgaggagttcgcgctggccaaccacctcatcaaggtcaagctggagggccacgagctgcccgccgacctgcccccgcacctggtgccgccctccaagcgcagacatgagtgatggcgcccggccccgcacctgccatttgcacgcccggccgggaggcagagacggggggaggggaagcctcaccatttctcaaggtccataaagactgagcggatgtttcctcgcctctcgaaaaggaaaaccaccatctttcttttaaggctgttcctgggcctggcgggggaggcaggggtgagaggatggaattgtgtgcacaagaactgtggctattttaatatataacgttagaggctgcgttctttgtcgccgcctcccctgtgtgccagccctgtgtgcacggcctctgccccccggccttgtgctgtggctggagctggacagtgcagtgactgcgaccgtgggggagccaggtcgcccttttggcagctgctaggctgaggctgcatggacaggaacaccaggcaccctccgtgtgcttctgagctgaggttgcttcacgggaccgtggcttccttcctcacctggctctgcctcccccgtgctctcgggcgaagtgggttcttgtgccttcccctcccgggcccaggctccccgtgcgcgggccctgccctttcctcccgcgccccaccggctccgacgcgcaaccccgctcagcagtcacagaagcagggcccagccaccttggtctttttttgggagttcaggggagtaggagaatgtcttccagaaaaatacataagctagtttctgttctgtaaagtgatatctttcatacttgaccaaagttcccaataacttcccaaccactgttcaaaagctgtgatttttgtctccccttcccaccctccagccaaggagcagccctgcccaggggaatttaggtgtgggtacccggggagcaccccgttcctggaccccagtgttgcatttcctggctgaggaagggtggtcatcccagctcctgccctaccctctcacttaactggagctttgggacgcaccctccacagtgggaggtggtggtggggtggcggtggcggggcctcacgacagcttggtgctggtaagaggaagcccgtggttctggctaggctctcatgtccagacagcggggaccaggggaaaacccagccccttctgtaatcccccttcatttcctaccttccttcctcctctgtttagcaaaggagggcagctcacttggatgtccttacaacgcccctggccccaggttgagcaataagaaaccagaaccttgcggcccagtggcccgggccagttcaggccgcctccccctcctctgcctggggccattgagccccagcctccaggggcccgggtgcgtttgcaagccagtggccactgtccgggctgtgatggcaccaaggcaggtggagcaccaggtaccacacagctgggcttcccaccaggctttcccgcgggggtctcagggagcttctccccagcgctgctcggagtctgcaggaactggccttgttctccttagcccgtcactccatacagtattaggtgaggatggatgcgggcgctgtccttgccgggaagtcactgttgaagttgcagtggcttgttcacacctgtgggaagagaagtgaagactttctccttgcattaaaaagtctgaactgtgaaaaaaaaaaaaaaaaaaaaaaaaa

SEQ ID NO: 336 - protein, 534 aa, Homo sapiens
  MISC_FEATURE (65)..(65): wherein "X" equals any naturally occuring amino acid.
MFSWVSKDARRKKEPELFQTVAEGLRQLYAQKLLPLEEHYRFHEFHSPALEDADFDNKPMVLLVXQYSTGKTTFIRHLIEQDFPGMRIGPEPTTDSFIAVMHGPTEGVVPGNALVVDPRRPFRKLNAFGNAFLNRFMCAQLPNPVLDSISIIDTPGILSGEKQRISRGYDFAAVLEWFAERVDRIILLFDAHKLDISDEFSEVIKALKNHEDKIRVVLNKADQIETQQLMRVYGALMWSLGKIINTPEVVRVYIGSFWSHPLLIPDNRKLFEAEEQDLFKDIQSLPRNAALRKLNDLIKRARLAKVHAYIISSLKKEMPNVFGKESKKKELVNNLGEIYQKIEREHQISPGDFPSLRKMQELLQTQDFSKFQALKPKLLDTVDDMLANDIARLMVMVRQEESLMPSQVVKGGAFDGTMNGPFGHGYGEGAGEGIHDVEWVVGKDKPTYDEIFYTLSPVNGKITGANAKKEMVKSKLPNTVLGKIWKLADVDKDGLLDDEEFALANHLIKVKLEGHELPADLPPHLVPPSKRRHE

SEQ ID NO: 337 - DNA, 1568 bp, Homo sapiens
  misc_feature (1424)..(1424): wherein "n" equals a, c, g, or t.
ggcggccgggccacgtcgtagcgaggtcagagtgccatctaaggtaattatagagacagtaaaattcttttactctgggaaaaataaaatgctgggtgtctcacaaaatttcagaacctgatttcaaacggatcataacaaagaggagatcaaatttagcatggtggactgctcgacaggatatatttgtcaatggaatgtttccacatattataccaccaacatgagaaaaaaatgatcattgtttatttgaagcttgatgatattctaacgctgccttttctcttctcattttagagaaaaatgagcaggcggaattgttggatttgtaagatgtgcagagatgaatctaagaggcccccttcaaaccttactttggaggaagtattacagtgggcccagtcttttgaaaatttaatggctacaaaatatggtccagtagtctatgcagcatatttaaaaatggagcacagtgacgagaatattcaattctggatggcatgtgaaacctataagaaaattgcctcacggtggagcagaatttctagggcaaagaagctttataagatttacatccagccacagtcccctagagagattaacattgacagttcgacaagagagactatcatcaggaacattcaggaacccactgaaacatgttttgaagaagctcagaaaatagtctatatgcatatggaaagggattcctaccccagatttctaaagtcagaaatgtaccaaaaacttttgaaaactatgcagtccaacaacagtttctgactacaactcaaaagtttaaatagaaaacagtatattgaaagtggtgggtttgatctttttatttagaaacccacaaaatcagaaacacagtacaaataaaacagaaatcaaactataagttgacttttagttcctaaaaagaaacatatttcaaaagcaatggaatctagaattcttataacatgaataacaaaatgtacagcaagcctatgtagttcaattaatatataaggaaaaggaaggtctttcttcatgatacaagcattataaagtttttactgtagtagtcaattaatggatatttccttgttaataaaattttgtgtcataatttacaaattagttctttaaaaattgttgttatatgaattgtgtttctagcatgaatgttctatagagtactctaaataacttgaatttatagacaaatgctactcacagtacaatcaattgtattataccatgagaaaatcaaaaaggtgttcttcagagacattttatctataaaattttcctactattatgttcattaacaaacttctttatcacatgtatcttctacgtgtaaaacatttctgatgattttttaacaaaaaatatatgaatttcttcatttgctcttgcatctacattgctataanggatataaaatgtggtttctatattttgagatgttttttccttacaatgtgaactcatcgtgatcttggaaatcaataaagtcaaatatcaactgaaaaaaaaaaaaaaaaaaaaaaaaaaaaaaaaagcggccgctgaattct

SEQ ID NO: 338 - protein, 159 aa, Homo sapiens
MSRRNCWICKMCRDESKRPPSNLTLEEVLQWAQSFENLMATKYGPVVYAAYLKMEHSDENIQFWMACETYKKIASRWSRISRAKKLYKIYIQPQSPREINIDSSTRETIIRNIQEPTETCFEEAQKIVYMHMERDSYPRFLKSEMYQKLLKTMQSNNSF

SEQ ID NO: 339 - DNA, 2112 bp, Homo sapiens
cggctttcaaagccaatttgaataaacaactcttccctctcaaatgggcaagagtaactcttcagcaccatggagaggtccgggcagcgtgttacaacgtgggactgtgaccagggcaagcactctgacagtgattaccgagaggatgggatggatctaggcagtgacgccggcagcagcagcagcagcagccgcgccagttcacagtccaactccaccaaagtgaccccttgctccgagtgcaaatcttcatcgtcgccggggggcagcctggacttggtgtctgccctggaggactatgaggagcccttcccggtctaccagaagaaggtgattgatgagtgggcgccggaggaggacggggaggaggaggaagaggaggacgagcgcgaccagcgagggtaccgggatgaccgctctccggcccgggaaccgggggacgtaagcgccaggacccgcagcggcggcggcgggggcaggagcgccaccaccgccatgccgcccccggtgcccaacggcaacctccaccagcacgacccccaggacctcaggcacaatggcaacgtggtggtggctggccggccgagctgttcccggggcccccgccgggcgatccaaaagccccagccggctgggggccggcgcagtggccgcggcccggcggctggggggctctgccttcagcccccagacggcgggacgtgcgtccccgaagagcccccggtgccacctatggattgggaggcgctggagaagcatctggccgggctgcagttccgggagcaggaggtacggaaccagggccaggcgaggaccaactccacctccgcacagaaaaatgagagagagtctatcagacagaagttggcacttggaagcttctttgatgatggcccaggaatttataccagctgtagcaaaagtgggaagccaagcctttcctcccgactgcagagtgggatgaacttgcagatatgctttgtcaacgacagtggcagtgataaggacagtgatgctgatgacagtaagactgaaaccagcttggacacccccttgtctcccatgagcaaacagagttcttcctattctgatagagacactactgaagaggagtctgaatccttggatgacatggacttccttacaaggcaaaagaaattgcaagctgaagccaaaatggcccttgccatggccaaaccaatggccaaaatgcaagtagaagtggagaaacagaacaggaaaaagtctcccgtcgctgatcttctgccacacatgcctcatataagtgaatgcttgatgaaaagaagtttaaaacccaccgacctgagagacatgactattgggcagctacaagtgatagtcaatgatctccattcccagatagaaagcttgaatgaagagttggtccagctgcttctcatccgagatgagctgcacacagagcaggatgccatgctggtggacattgaagacttgaccagacatgctgaaagtcagcagaagcacatggcagagaaaatgcctgcaaagtgaaaagaagccattcaaccagagaacaagctagaatttattttgcttctgtggttgtaaaaatgctgttgctaaaggtggcgcagaaacaaatatcagtgttagtcattgataatgtctgaagcttaatgtccagtgattggcctttgcttcttaatttattttaattttttacttgtgccacttaatatcaggcattttaataaaatattgttacaaaaaatgtacagtactgacaccaccacaaatcatggttaataaaagagagtagttttaactttatttttatttgtttagagattttaagttggaacagtattttcccattgactacttttcattcttcactgtagttttaaagaagaactgtaaatgacggtgctatacaagtcaaaaaatacatgcctgcctcgtagtgaagttgtagctctccgtaatatgtatattttactcagttttcaacattttgtgaatgttgactacctgaagttcctttttagatgtgctattaacattctgttggattcagagggttccttgaaagttttatgtataaatatgtaaaataaaaattaaaacccg

SEQ ID NO: 340 - protein, 487 aa, Homo sapiens
MERSGQRVTTWDCDQGKHSDSDYREDGMDLGSDAGSSSSSSRASSQSNSTKVTPCSECKSSSSPGGSLDLVSALEDYEEPFPVYQKKVIDEWAPEEDGEEEEEEDERDQRGYRDDRSPAREPGDVSARTRSGGGGGRSATTAMPPPVPNGNLHQHDPQDLRHNGNVVVAGRPSCSRGPRRAIQKPQPAGGRRSGRGPAAGGLCLQPPDGGTCVPEEPPVPPMDWEALEKHLAGLQFREQEVRNQGQARTNSTSAQKNERESIRQKLALGSFFDDGPGIYTSCSKSGKPSLSSRLQSGMNLQICFVNDSGSDKDSDADDSKTETSLDTPLSPMSKQSSSYSDRDTTEEESESLDDMDFLTRQKKLQAEAKMALAMAKPMAKMQVEVEKQNRKKSPVADLLPHMPHISECLMKRSLKPTDLRDMTIGQLQVIVNDLHSQIESLNEELVQLLLIRDELHTEQDAMLVDIEDLTRHAESQQKHMAEKMPAK

SEQ ID NO: 341 - DNA, 1633 bp, Homo sapiens
cacgagggggacccgggccgcgtgggcgccgggatggagggcgccaaggggcggggagcgggcgtgcgtgtgtgtgcgagtgcgaatgcgagggaggccggccttgagtgaaaccggagctacaaagaaggggagagtccgggagcgggagggcgcgagggaggagcggcggctccggggcagctccgacgccctcccgcggggaaggagcccccgcggtgccgccgaggccccgacgcggggccgcccctcggctcgccgccccgcgcccgcgcccgctgggaatgatgaagaagaacaattccgccaagcggggacctcaggatggaaaccagcagcctgcaccgcccgagaaggtcggctgggtccggaaattctgcgggaaagggattttcagggagatttggaaaaaccgctatgtggtgctgaaaggggaccagctctacatctctgagaaggaggtaaaagatgagaaaaatattcaagaggtatttgacctgagtgactatgagaagtgtgaagagctccggaagtccaagagcaggagcaagaaaaatcatagcaagtttactcttgcccactccaaacagcccggtaacacggcacccaacctgatcttcctggcagtgagtccagaagagaaggaatcgtggatcaatgccctcaactctgccatcacccgagccaagaaccgtatcttggatgaggtcaccgttgaggaggacagctatcttgcccatcccactcgagacagggcaaaaatccagcactcccgccgccccccaacaaggggacacctaatggctgtggcttccacctctacctcggatgggatgctgaccttggacttgatccaagaggaagacccttcccctgaggaaccaacctcttgtgctgagagctttcgggttgacctggacaagtctgtggcccagctggcagggagccggcggagagcggactcagaccgcatccagccctccgcagaccgggcaagcagtctctcccgaccttgggaaaaaacagacaaaggggccacctacaccccccaggcacccaagaagttgacgcccacagagaaaggccgctgcgcctccctggaggagatcctatctcagcgggatgctgcctctgcccgcaccctccagctgcgggctgaggaacccccaacccctgccctccccaacccggggcagctgtcccggatccaggacctggtagcaaggaaactggaggagactcaggagcttctggcagaggttcagggactgggagatgggaagcgaaaggccaaggacccccctcggtctccgccggattctgagtcagagcagctgctgctggagacggaacggctgctgggagaggcatcatcgaattggagccaggcaaagagggtgctgcaggaggtcagggagctgagagacctgtacagacagatggacctgcagaccccggactcccacctcagacagaccaccccgcacagtcagtaccggaagagcctgatgtgagggcagggtggggtctggaacttgtcgggttggacagactcttatctccgtgttgctggataaagcttttttatttacctcaatcaaaaaaagaaaacaaaaatgaaaaaaaaaaaaaa

SEQ ID NO: 342 - protein, 409 aa, Homo sapiens
MMKKNNSAKRGPQDGNQQPAPPEKVGWVRKFCGKGIFREIWKNRYVVLKGDQLYISEKEVKDEKNIQEVFDLSDYEKCEELRKSKSRSKKNHSKFTLAHSKQPGNTAPNLIFLAVSPEEKESWINALNSAITRAKNRILDEVTVEEDSYLAHPTRDRAKIQHSRRPPTRGHLMAVASTSTSDGMLTLDLIQEEDPSPEEPTSCAESFRVDLDKSVAQLAGSRRRADSDRIQPSADRASSLSRPWEKTDKGATYTPQAPKKLTPTEKGRCASLEEILSQRDAASARTLQLRAEEPPTPALPNPGQLSRIQDLVARKLEETQELLAEVQGLGDGKRKAKDPPRSPPDSESEQLLLETERLLGEASSNWSQAKRVLQEVRELRDLYRQMDLQTPDSHLRQTTPHSQYRKSLM

SEQ ID NO: 343 - DNA, 2685 bp, Homo sapiens
ggacttgggaggcgcggtgaggagtcaggcttaaaacttgttggaggggagtaaccagcctgctcctctcgctctcctcctcgtctgcgccgcgtttcagagagaaaattcctgttccaagagaaaataaggcaacatcaatgaaggagagaagagccagccagaaattatccagcaaatctatcatggatcctaatcagaacgtgaaatgcaagatagttgtggtgggagacagtcagtgtggaaaaactgcgctgctccatgtcttcgccaaggactgcttccccgagaattacgttcctacagtgtttgagaattacacggccagttttgaaatcgacacacaaagaatagagttgagcctgtgggacacttcgggttctccttactatgacaatgtccgccccctctcttaccctgattcggatgctgtgctgatttgctttgacatcagtagaccagagaccctggacagtgtcctcaaaaagtggaaaggtgaaatccaggaattttgtccaaataccaaaatgctcttggtcggctgcaagtctgatctgcggacagatgttagtacattagtagagctctccaatcacaggcagacgccagtgtcctatgaccagggggcaaatatggccaaacagattggagcagctacttatatcgaatgctcagctttacagtcggaaaatagcgtcagagacatttttcacgttgccaccttggcatgtgtaaataagacaaataaaaacgttaagcggaacaaatcacagagagccacaaagcggatttcacacatgcctagcagaccagaactctcggcagttgctacggacttacgaaaggacaaagcgaagagctgcactgtgatgtgaatctttcattatctttaatgaagacaaaggaatctagtgtaaaaaacaacagcaaacaaaaaggtgaagtctaaatgaagtgcacagccaaagtcatgtataccagaggcttaggaggcgtttgagaggatactcatctttttggaatcctgaccttaggttcggcatgtagaccaagtgatgagaagtgaatacatggaagagtttttaagtgtgacttgaaaaatatgccaaaaaatgagagatacaaatgagctagaggaagatgaggggggatgcgagtacctccaagaagaaaaatcacactctgaatggtgcttgcatttttgggttttttttttttttgttataatctattcatggatctccactttgatttaatttttaaatgttttaatctcctttacaaaaagtatacgttaatataccgtcctcaagggggaactggcactgtgaccttagcatttagttttctagaggatgtgatctaatttctttctagctcatcattaaaaaggaaattgtatcaggacccatgggatatatccagaggcaaactttatgaggctttgaaatcttgccttcctgaagatagctgagtaggatggttctaaggaaagcctttgcaatcttgcaagatttgtagaccagcactacaaagatcgcatagatcaaataggaaaaaaaatgtcgatttttattcagtctgatggttctgttcttcattgtgattgtcattaaaaagtggtaaattgctcaatgtaatatttttgtgcgctgtttagaagttgtgtgattttttgccatcgttgataaaaatgcaaagtcaaataaaaggtgtcttggtttgatgtcatagaatgatccaaggagagaaaaaaggtagttactgttttcaccagaaaaggtaatgagtgaaggaaagaatagtagcagaaagcacagtttgtgagtaaagctgtctggaattaagttaccaaaaatacaaagcaaaaggactattattttgggttgaagctccaaaactgacagcatctgataatctgttggtttatttcacttttcattaaatgaacattgatgagagaagatgccacttacccaagctttagagaatccctagtggaagattatatgataaactttcagtcctgacataacactagggcatttctagagtgtcattgctaaaacctcactgaacagacgcagccaaggtctgtgttcagcacttggtctctgttgttacgtaaaataataagcatttaaaatagtttacagatatttttgaccagttccttttagagattctttcagagaagaaaccagatctgacctgtttattgttggcgcttgttgaaaacgagctttctttcccatgatagtgcttcgtttttgaagtgttgaagctgtgctccccttaaatcgtggcaggagagattaaggtaattacaacactcagttctatgtcttacaagcactttgtcttgtctctgcaagaaaattcgattccagtcatttcccataaaatacagacattttaccaacataatatgctttgattgatgcagcattatgctttgggcagtattacaaaatagctggcgagtgctttctgtatttaaatattgtaaaaagaaaataagttataactgttataaagcagaacttttgttgcattttttaaactgttgaagtcactgtgtatgtttgtttggtcaatgtttccgcagtatttattaaaacatacttttttttttcttcaaataaaaaagtaaccatgtctttgtctaaaaaaaaaaaaaaaaaa

SEQ ID NO: 344 - protein, 244 aa, Homo sapiens
MKERRASQKLSSKSIMDPNQNVKCKIVVVGDSQCGKTALLHVFAKDCFPENYVPTVFENYTASFEIDTQRIELSLWDTSGSPYYDNVRPLSYPDSDAVLICFDISRPETLDSVLKKWKGEIQEFCPNTKMLLVGCKSDLRTDVSTLVELSNHRQTPVSYDQGANMAKQIGAATYIECSALQSENSVRDIFHVATLACVNKTNKNVKRNKSQRATKRISHMPSRPELSAVATDLRKDKAKSCTVM

SEQ ID NO: 345 - DNA, 1507 bp, Homo sapiens
aaacagttgccttttcctctcacagaaggaagatttcattttgtttgagacgagaaaccaaaccacacaccaaagagaggggtatgatggctaagaagcccccaaaaccagcccctcgcaggatcttccaggaaaggttaaagattactgctctacctttgtactttgaaggttttttattaatcaagcggtcaggataccgggagtatgagcattactggacagagttgagaggaactactcttttcttttataccgacaaaaagagtataatatatgttgacaaattagacatagtagacctcacatgccttactgagcagaattcaactgaaaagaactgtgcgaaattcacccttgttttgccgaaagaggaagtacaactgaagacagagaacacagaaagtggggaagaatggagaggcttcattcttacagtaacagagctgtcagttccccaaaacgtgtcactcctacctgggcaagtaattaaactgcatgaagtcctagagagagaaaagaaaaggaggattgagacagagcagagtacgtccgtggaaaaagagaaggaaccaactgaagattatgtggatgtactgaaccctatgccagcatgtttttatacagtgtcccggaaagaggcaactgagatgctccagaagaacccttctttgggaaatatgatcctgaggcctggtagtgacagtagaaactactccatcactattcggcaggagatagacattccaagaatcaagcactacaaagtgatgagcgtaggacaaaactacactattgaactggaaaaacctgtaacactcccaaaccttttcagtgtcattgattattttgtgaaggagactcgaggaaatttaagaccatttatatgttcaactgatgaaaacactggtcaagaacccagtatggaagggagaagtgaaaagttgaagaaaaatccacacattgcatgaaatacaatgtgaaagctcctttgtatatcttggtaatttatattttcaaaacgaagttcttacttttaaagagaattacctatattctcctgatactgattaccaagtcattcacctgaacaccagaattagaattaaacattgtaccatacaatttcattatcttatcagaatgaaaccaattcacagggaaactagagactacggctgtggtggtaacctgcagatatacacattcccatgcactgacataagttgaaaacacatagtactttctagatggaatttttttctttaggcctcaatgaaatacatttcccctatataattccaacagcagtttctctagttctaaattttaccaattcccaaaaaacctaagttttgctgaaatctgatttgaccaatttatcaaatatgtcattttaattacctagctggaagttagagacatgaaatgtactagaggagcccttttccaatggaaatattatataccacattttttgttaatggaaataaatgtctccattccc

SEQ ID NO: 346 - protein, 295 aa, Homo sapiens
MMAKKPPKPAPRRIFQERLKITALPLYFEGFLLIKRSGYREYEHYWTELRGTTLFFYTDKKSIIYVDKLDIVDLTCLTEQNSTEKNCAKFTLVLPKEEVQLKTENTESGEEWRGFILTVTELSVPQNVSLLPGQVIKLHEVLEREKKRRIETEQSTSVEKEKEPTEDYVDVLNPMPACFYTVSRKEATEMLQKNPSLGNMILRPGSDSRNYSITIRQEIDIPRIKHYKVMSVGQNYTIELEKPVTLPNLFSVIDYFVKETRGNLRPFICSTDENTGQEPSMEGRSEKLKKNPHIA

SEQ ID NO: 347 - DNA, 4733 bp, Homo sapiens
gtggcccgagtcgcgcgcaccggcggcggcgggggcagcgcggcgcgtgtctgtgcgctgcggtcgctcgggaccgggaccggggcgaggcgccgcggggctgagcccagcagacattgcgttggcctccgagcagggcgcatcatgcagcgttcgcgcaccggagagaaaactgagaatgaaattgctttggcaagctaaaatgagctcgattcaggactggggtgaagaggtagaggaaggagctgtttaccatgtcaccctcaaaagagtccagattcaacaggctgccaataaaggagcaagatggctaggggttgaaggggaccagctgcctccaggacacacagtcagtcaatatgaaacctgtaagatcaggaccataaaagctggcaccttggagaagcttgtggagaacctgctgacagcttttggggacaatgactttacctatatcagcatctttctttcaacgtacagaggctttgcctccactaaagaagtgctggaactactgctggacaggtatggaaacctgacaagcccaaactgtgaagaagatggaagccaaagttcatcagagtccaaaatggtgatcaggaatgcaatcgcttccatactaagggcctggcttgaccagtgtgcagaagacttccgagagccccctcacttcccttgcttacagaaactgctggattatctcacacggatgatgccgggctctgacccagaaagaagagcacaaaatcttcttgagcagtttcagaagcaagaagtggaaactgacaatgggcttcccaacacgatctccttcagcctggaagaggaagaggaactggagggtggagagtcagcagaattcacgtgcttctcagaagatctcgtggcagagcagctgacctacatggatgcacaactcttcaagaaagtagtgcctcaccactgcctgggctgcatttggtctcgaagggataagaaggaaaacaaacatttggctcctacgatccgtgccaccatctctcagtttaataccctcaccaaatgtgttgtcagcaccatcctggggggcaaagaactcaaaactcagcagagagccaaaatcattgagaagtggatcaacatcgctcatgaatgtagactcctgaagaatttttcctccttgagggccatcgtttcggcactgcagtctaattccatctatcggttaaaaaagacttgggctgccgtcccaagggaccgaatgctgatgtttgaagaactttcagatatcttctcagaccataataaccatttgaccagccgagaactactgatgaaggaaggaacctcaaaatttgcaaacctggacagcagtgtgaaagaaaaccagaagcgtacccagaggcggctgcagctccagaaggacatgggtgtgatgcagggaactgtgccctacctgggcaccttcctgactgacctgaccatgcttgacactgcccttcaggactacatcgagggtggactgataaactttgagaaaaggagaagggaatttgaagtgattgcccagataaagctcttacagtctgcctgcaacagctattgcatgaccccagaccaaaagttcatccagtggttccagaggcagcagctcctgacagaggaggagagctatgccctgtcatgtgagattgaagcagctgctgacgccagcaccacctcgcccaagcctcggaagagcatggtgaagagactcagcctactgtttctagggtctgacatgatcaccagtcccactcccaccaaagagcagcccaagtccactgccagcgggagctctggtgaaagcatggactctgtcagcgtgtcatcctgcgagtcgaaccactcagaggctgaggagggctccattactcccatggacacccctgatgagcctcaaaaaaagctctctgagtcctcctcatcctgttcttctatccattccatggacacaaattcctcagggatgtcttccttaatcaaccccctctcctcccctccgtcctgcaacaacaaccccaaaatccacaagcgctctgtctcggtgacgtccattacctcgactgtgctgcctcctgtttacaaccaacagaatgaagacacctgcataatccgcatcagtgtggaagacaataacggcaacatgtacaagagcatcatgttgacgagccaggataaaacccccgctgtgatccagagagccatgctgaagcacaatctggactcagaccccgccgaggagtacgagctggtgcaggtcatctcggaggacaaagaacttgtgattccagactcagcaaatgtcttttatgccatgaacagccaagtgaactttgacttcattttgcgcaaaaagaactccatggaagaacaagtgaaactgcgtagccggaccagcttgacgttgcccaggacagctaaacggggctgctggagtaacagacacagcaaaatcaccctctgaagggagggaccagtggccccttgtttgccaaaggcagagtggggctgagaaacaggctgcggtgattgcaattaccatccggtgttcgaggatcattggtgaagtcagcagatatttattgagttcctgtggtgtgcaaagcattatgataggcaccgtggggaaactggaaatgaatttgacatgaaaaggatgaacgattcactgattctctttgactcatttgagactaaaatgcagaattaccaacatttaaaacatatatatgcacatgtatttggtatgcatgtgtatctatataaaaatatataagagggactttatgggatagtatggactatggaaaaacaaatttgcacaatggcctgggaagttgaggtcactttttacagggaaatagaagaaactgagaacctagtctcgtatattctgagtaaatggaatcagtcctgggaatagagagtgtcctttgtgccagtattacaagaagcccaaactttatttttataaagggagaggatgactttctcaatcaagtgccaccagataaaaacaactgcagaggctggaactgccacaggctgtatgaaaggccactttggaaagggtttggatgagctggtggccttcaacctctgcctgcatctgccactttctgctaccctagggaggccaggaggagcttcggaggaccatcgccccactggtctagccatcatgacacctctggaggtgtcaagctcctgaaacaagctcatttcagtttctggcaaccccgtgtatttccgttttccccctaaagaacatatcataatcattgcacaaataaccatgttctttggtaatgaagccagaaaagaaagcgcaaaagaatggtgactcatttggactcttatctgtcttggaatgtcactgcttcattgccttctctgattgccttttgcatgtaaaactatgtgtctggagtcttttgccatctggatcttagtacctctttattatgtgcaatttattcctcaggtgtggaaatttctactgcaattgactacgtttgattattttgagcttgtgaaagatttctgaacagtgattgtcccgttaatagcccctcagaagatgttccctgctgataacagcatcctattttacttacttttatagcattactgtgcctagtcgtggggaaagagatggggctgtatagattatctgaatcatttgtctaagaggtacattcttccagatggaatcaataacttttttttttccaggttcccgtgcttgctatcacagtatcattgttaagtgacacttttgtctctcataacaccatcacactcttccttccaagtctgagctgtgctggggtttgaactaaaagccatatgtggaatattgacatgtgtaagaagcactttcagaatgttgtcctttttaagaaatgattctcaaaataccagtttttattccaaaaatttagagaacaaacccggaatatgaagtgcagattgtaacatggagctatttttttttcctaatcccataatacagctcctaaaagttgtgtgggatttgcgttgcataaatagccatgtgaattccacaagaagcaccagggaaagtttagagatttgcggcaatggaccgaagaacgggccaggaagtcctccaatttcctttggtctttccaggagattggactacacattgtaaagactgactgggtttcaactagtcaaaaagcactttcttctgttttcaatccctgttcgatttgtgcttctgtgcttgtaggagagatggccagggtggcagccctcatgcaggttgaagtatatgtagcctcagcctgatattcttggtgcgaaggtaaaaaaaaaaaaaataaataaaaccattggcctggttgagggcgtgaccaccaagacatatatgttgtgcccgtgttcatcctgtgtatttatactgtatatgtagagtctagatttatatactgcaatgtaaaatatatatatatttaccttttttaaagacaatggaaattccaagtagctaaaacttagcttcatttatttaatgccactttaaatgtcttaaatttgtttcctggtggacagccgggtaatgcttttagctgctcgcatgcttgtctttctgcatctccatcatctgtttaccttttggttaaactaataaactagtttgggacttggctggcatgtgctgccagacccaaagggaaaaaaaa

SEQ ID NO: 348 - protein, 768 aa, Homo sapiens
MKLLWQAKMSSIQDWGEEVEEGAVYHVTLKRVQIQQAANKGARWLGVEGDQLPPGHTVSQYETCKIRTIKAGTLEKLVENLLTAFGDNDFTYISIFLSTYRGFASTKEVLELLLDRYGNLTSPNCEEDGSQSSSESKMVIRNAIASILRAWLDQCAEDFREPPHFPCLQKLLDYLTRMMPGSDPERRAQNLLEQFQKQEVETDNGLPNTISFSLEEEEELEGGESAEFTCFSEDLVAEQLTYMDAQLFKKVVPHHCLGCIWSRRDKKENKHLAPTIRATISQFNTLTKCVVSTILGGKELKTQQRAKIIEKWINIAHECRLLKNFSSLRAIVSALQSNSIYRLKKTWAAVPRDRMLMFEELSDIFSDHNNHLTSRELLMKEGTSKFANLDSSVKENQKRTQRRLQLQKDMGVMQGTVPYLGTFLTDLTMLDTALQDYIEGGLINFEKRRREFEVIAQIKLLQSACNSYCMTPDQKFIQWFQRQQLLTEEESYALSCEIEAAADASTTSPKPRKSMVKRLSLLFLGSDMITSPTPTKEQPKSTASGSSGESMDSVSVSSCESNHSEAEEGSITPMDTPDEPQKKLSESSSSCSSIHSMDTNSSGMSSLINPLSSPPSCNNNPKIHKRSVSVTSITSTVLPPVYNQQNEDTCIIRISVEDNNGNMYKSIMLTSQDKTPAVIQRAMLKHNLDSDPAEEYELVQVISEDKELVIPDSANVFYAMNSQVNFDFILRKKNSMEEQVKLRSRTSLTLPRTAKRGCWSNRHSKITL

SEQ ID NO: 349 - DNA, 1919 bp, Homo sapiens
tgtaactctcccaatcttgaggagtgatccctgtcccagcccctggaaagcgaggaacgacaaactcaaagtccaggatgttcaccatgacaagagccatggaagaggctctttttcagcacttcatgcaccagaagctggggatcgcctatgccatacacaagccatttcccttctttgaaggcctcctagacaactccatcatcactaagagaatgtacatggaatctctggaagcctgtagaaatttgatccctgtatccagagtggtgcacaacattctcacccaactggagaggacttttaacctgtctcttctggtgacattgttcagtcaaattaacctgcgtgaatatcccaatctggtgacgatttacagaagcttcaaacgtgttggtgcttcctatgaacggcagagcagagacacaccaatcctacttgaagccccaactggcctagcagaaggaagctccctccataccccactggcgctgccccaccacaaaccccctcaaccaagctgttcaccctgtgcgccaagagtcagtgagcctggaacatcctcccagcaaagcactgagatcctgagtgagtcgcccagcccatctgaccctgtcctgcctctccctgcactcatccaggaaggaagaagcacttcagtgaccaatgacaagttaacatccaaaatgaatgcggaagaagactcagaagagatgcccagcctcctcactagcactgtgcaagtggccagtgacaacctgatcccccaaataagagataaagaagaccctcaagagatgccccactctcccttgggctctatgccagagataagagataattctccagaaccaaatgacccagaagagccccaggaggtgtccagcacaccttcagacaagaaaggaaagaaaagaaaaagatgtatctggtcaactccaaaaaggagacataagaaaaaaagcctcccaagagggacagcctcatctagacacggaatccaaaagaagctcaaaagggtggatcaggttcctcaaaagaaagatgactcaacttgtaactccacggtagagacaagggcccaaaaggcgagaactgaatgtgcccgaaagtcgagatcagaggagatcattgatggcacttcagaaatgaatgaaggaaagaggtcccagaagacgcctagtacaccacgaagggtcacacaaggggcagcctcacctgggcatggcatccaagagaagctccaagtggtggataaggtgactcaaaggaaagacgactcaacctggaactcagaggtcatgatgagggtccaaaaggcaagaactaaatgtgcccgaaagtccagatcgaaagaaaagaaaaaggagaaagatatctgttcaagctcaaaaaggagatttcagaaaaatattcaccgaagaggaaaacccaaaagtgacactgtggattttcactgttctaagctccccgtgacctgtggtgaggcgaaagggattttatataagaagaaaatgaaacacggatcctcagtgaagtgcattcggaatgaggatggaacttggttaacaccaaatgaatttgaagtcgaaggaaaaggaaggaacgcaaagaactggaaacggaatatacgttgtgaaggaacgaccctaggagagctgctgaagagtggactttgctctgtcctccaagaataaatctcaagagagagttaaatagcaagtgaatttctactaccctctcagtcaccatgttgcagactttccctgtctggaggctcaccttagagcttctgagtttccaagctctgagtcacctccacatttgggcatggcatcttcaaaacaattaatttgcatagttaatttgggatggggaagcaaatgactctaaaataaaaattaaatgaaaaagcgccg

SEQ ID NO: 350 - protein, 539 aa, Homo sapiens [sequence omitted]

SEQ ID NO: 351 - DNA, 4003 bp, Homo sapiens
attaaacctctcgccgagcccctccgcagactctgcgccggaaagtttcatttgctgtatgccatcctcgagagctgtctaggttaacgttcgcactctgtgtatataacctcgacagtcttggcacctaacgtgctgtgcgtagctgctcctttggttgaatccccaggcccttgttggggcacaaggtggcaggatgtctcagtggtacgaacttcagcagcttgactcaaaattcctggagcaggttcaccagctttatgatgacagttttcccatggaaatcagacagtacctggcacagtggttagaaaagcaagactgggagcacgctgccaatgatgtttcatttgccaccatccgttttcatgacctcctgtcacagctggatgatcaatatagtcgcttttctttggagaataacttcttgctacagcataacataaggaaaagcaagcgtaatcttcaggataattttcaggaagacccaatccagatgtctatgatcatttacagctgtctgaaggaagaaaggaaaattctggaaaacgcccagagatttaatcaggctcagtcggggaatattcagagcacagtgatgttagacaaacagaaagagcttgacagtaaagtcagaaatgtgaaggacaaggttatgtgtatagagcatgaaatcaagagcctggaagatttacaagatgaatatgacttcaaatgcaaaaccttgcagaacagagaacacgagaccaatggtgtggcaaagagtgatcagaaacaagaacagctgttactcaagaagatgtatttaatgcttgacaataagagaaaggaagtagttcacaaaataatagagttgctgaatgtcactgaacttacccagaatgccctgattaatgatgaactagtggagtggaagcggagacagcagagcgcctgtattggggggccgcccaatgcttgcttggatcagctgcagaactggttcactatagttgcggagagtctgcagcaagttcggcagcagcttaaaaagttggaggaattggaacagaaatacacctacgaacatgaccctatcacaaaaaacaaacaagtgttatgggaccgcaccttcagtcttttccagcagctcattcagagctcgtttgtggtggaaagacagccctgcatgccaacgcaccctcagaggccgctggtcttgaagacaggggtccagttcactgtgaagttgagactgttggtgaaattgcaagagctgaattataatttgaaagtcaaagtcttatttgataaagatgtgaatgagagaaatacagtaaaaggatttaggaagttcaacattttgggcacgcacacaaaagtgatgaacatggaggagtccaccaatggcagtctggcggctgaatttcggcacctgcaattgaaagaacagaaaaatgctggcaccagaacgaatgagggtcctctcatcgttactgaagagcttcactcccttagttttgaaacccaattgtgccagcctggtttggtaattgacctcgagacgacctctctgcccgttgtggtgatctccaacgtcagccagctcccgagcggttgggcctccatcctttggtacaacatgctggtggcggaacccaggaatctgtccttcttcctgactccaccatgtgcacgatgggctcagctttcagaagtgctgagttggcagttttcttctgtcaccaaaagaggtctcaatgtggaccagctgaacatgttgggagagaagcttcttggtcctaacgccagccccgatggtctcattccgtggacgaggttttgtaaggaaaatataaatgataaaaattttcccttctggctttggattgaaagcatcctagaactcattaaaaaacacctgctccctctctggaatgatgggtgcatcatgggcttcatcagcaaggagcgagagcgtgccctgttgaaggaccagcagccggggaccttcctgctgcggttcagtgagagctcccgggaaggggccatcacattcacatgggtggagcggtcccagaacggaggcgaacctgacttccatgcggttgaaccctacacgaagaaagaactttctgctgttactttccctgacatcattcgcaattacaaagtcatggctgctgagaatattcctgagaatcccctgaagtatctgtatccaaatattgacaaagaccatgcctttggaaagtattactccaggccaaaggaagcaccagagccaatggaacttgatggccctaaaggaactggatatatcaagactgagttgatttctgtgtctgaagttcacccttctagacttcagaccacagacaacctgctccccatgtctcctgaggagtttgacgaggtgtctcggatagtgggctctgtagaattcgacagtatgatgaacacagtatagagcatgaatttttttcatcttctctggcgacagttttccttctcatctgtgattccctcctgctactctgttccttcacatcctgtgtttctagggaaatgaaagaaaggccagcaaattcgctgcaacctgttgatagcaagtgaatttttctctaactcagaaacatcagttactctgaagggcatcatgcatcttactgaaggtaaaattgaaaggcattctctgaagagtgggtttcacaagtgaaaaacatccagatacacccaaagtatcaggacgagaatgagggtcctttgggaaaggagaagttaagcaacatctagcaaatgttatgcataaagtcagtgcccaactgttataggttgttggataaatcagtggttatttagggaactgcttgacgtaggaacggtaaatttctgtgggagaattcttacatgttttctttgctttaagtgtaactggcagttttccattggtttacctgtgaaatagttcaaagccaagtttatatacaattatatcagtcctctttcaaaggtagccatcatggatctggtagggggaaaatgtgtattttattacatctttcacattggctatttaaagacaaagacaaattctgtttcttgagaagagaatattagctttactgtttgttatggcttaatgacactagctaatatcaatagaaggatgtacatttccaaattcacaagttgtgtttgatatccaaagctgaatacattctgctttcatcttggtcacatacaattatttttacagttctcccaagggagttaggctattcacaaccactcattcaaaagttgaaattaaccatagatgtagataaactcagaaatttaattcatgtttcttaaatgggctactttgtcctttttgttattagggtggtatttagtctattagccacaaaattgggaaaggagtagaaaaagcagtaactgacaacttgaataatacaccagagataatatgagaatcagatcatttcaaaactcatttcctatgtaactgcattgagaactgcatatgtttcgctgatatatgtgtttttcacatttgcgaatggttccattctctctcctgtactttttccagacacttttttgagtggatgatgtttcgtgaagtatactgtatttttacctttttccttccttatcactgacacaaaaagtagattaagagatgggtttgacaaggttcttcccttttacatactgctgtctatgtggctgtatcttgtttttccactactgctaccacaactatattatcatgcaaatgctgtattcttctttggtggagataaagatttcttgagttttgttttaaaattaaagctaaagtatctgtattgcattaaatataatatcgacacagtgctttccgtggcactgcatacaatctgaggcctcctctctcagtttttatatagatggcgagaacctaagtttcagttgattttacaattgaaatgactaaaaaacaaagaagacaacattaaaaacaatattgtttcta

SEQ ID NO: 352 - protein, 750 aa, Homo sapiens
MSQWYELQQLDSKFLEQVHQLYDDSFPMEIRQYLAQWLEKQDWEHAANDVSFATIRFHDLLSQLDDQYSRFSLENNFLLQHNIRKSKRNLQDNFQEDPIQMSMIIYSCLKEERKILENAQRFNQAQSGNIQSTVMLDKQKELDSKVRNVKDKVMCIEHEIKSLEDLQDEYDFKCKTLQNREHETNGVAKSDQKQEQLLLKKMYLMLDNKRKEVVHKIIELLNVTELTQNALINDELVEWKRRQQSACIGGPPNACLDQLQNWFTIVAESLQQVRQQLKKLEELEQKYTYEHDPITKNKQVLWDRTFSLFQQLIQSSFVVERQPCMPTHPQRPLVLKTGVQFTVKLRLLVKLQELNYNLKVKVLFDKDVNERNTVKGFRKFNILGTHTKVMNMEESTNGSLAAEFRHLQLKEQKNAGTRTNEGPLIVTEELHSLSFETQLCQPGLVIDLETTSLPVVVISNVSQLPSGWASILWYNMLVAEPRNLSFFLTPPCARWAQLSEVLSWQFSSVTKRGLNVDQLNMLGEKLLGPNASPDGLIPWTRFCKENINDKNFPFWLWIESILELIKKHLLPLWNDGCIMGFISKERERALLKDQQPGTFLLRFSESSREGAITFTWVERSQNGGEPDFHAVEPYTKKELSAVTFPDIIRNYKVMAAENIPENPLKYLYPNIDKDHAFGKYYSRPKEAPEPMELDGPKGTGYIKTELISVSEVHPSRLQTTDNLLPMSPEEFDEVSRIVGSVEFDSMMNTV

SEQ ID NO: 353 - DNA, 3748 bp, Homo sapiens
cgtctgtaaacacccagagactgtcatggagggggaggaggaggcggcggcggcgaagggaggcgtttggggccgcctccagggtccgctctgccattcctgaactggtccctcgtccccgtgactctggcatcagggaagcgaactgttaggcgagaggaggaggcagccagaaccatatccccttcttcctcggggcgggggccgggccaggccggctgagccgggggagggctccgggagggagtgcctggccaggccggcctgtctgccgcgatggatgacagtaaggtggttggaggcaaagtaaagaagcccggtaaacgtggtcggaagccagccaaaattgacttgaaagcaaaacttgagaggagccggcagagtgcaagagaatgccgagcccgaaaaaagctgagatatcagtatttggaagagttggtatccagtcgagaaagagctatatgtgccctcagagaggaactggaaatgtacaagcagtggtgcatggcaatggaccaaggaaaaatcccttctgaaataaaggccctactcactggagaagagcagaacaaatctcagcagaactcaagcaggcataccaaggctgggaagacagatgctaatagcaattcctggtgaagattatataaagatgagtcagtgattgaagccaatattctgattcccatggaagatggatgggcaagagtgtacttcttggctccatttactacctactgctcagtagtcatctctgtaaatctgcaatttctaccaaaatgtgtgatcgtagatctcaaaggatcttgctttaactttcaacacttagaaaatctacaaacattcagacctgtctgggttggtattgccacccatgacatttaacatgttgtgatgcttgaaaacacaggagtagagaaaatcgatgaagattgtatttttgcaccttaactccacattgctttattggttaatttatattctttccatgtaattcatgtaattgtatgtctgtgtgtgttttatgtgtcaccacctttcatgtttttgattgccctacaaagagaaaccaaatgagctgattactgactataagttctcagcctttatggacctaatcttatttttatttacttgagtaatgtttattctctgcatgaaccatgatttctcctgtgagccattccagcataagctgtgaatatgtattaacaaatatatacatttctatttttataatccataaggatatgcctgttttaaataacatacatattaacaatatctatcaggaaaaccctcaagacagcttctagttaaaacctttgttgctgtcctctcaaactatatttataaaaatttgctagggccaaatccatacttgcagaataattcatcaaattttatttttaagtgaaaagtaacctttcaggcatttcagcagcatacattgacaatctagggtatatatgtatgtatgtttcttattgtatgtctatatatgtatgtggggaggacaggagtgaatgttcacacacttttcttgcgtactcaactaaattggagaatgtttctgaagaaaattggatgaaattagctgctgagattgagtttctgccttaaaatctgaaacaaaaaaagggacaaattgctggtagatctactgactgtagccatcaccagaacacttagtttcttcccagacatgaatttcctgacaggctctgagccagaaacacactgtgggcgtgcatctggttcagccctggatatgcctccactgtggagggaagcattggaactggagttgtgcacagcaccgcagctagtgggcctggctgggggtgcagaagggcagggtagttctttccatttccccttgcagctacacttactttctccctgactaccaaatggagtgacggttgaagaatcaagctcataatatgatacacccagacagacccagaaatcttttgatttccccagcgagatacttaccactctctcttctctttcccatggttaaaacaggagttgtgttctctgtcgctgctaaattattcttcacttgagtgaagcaaatatttagcttccaaataaagtatattttgttctgaactggcagtttaagaggagataccgtagtctagattgtctttgaggtagaatatatgatggaccacatagtttaagattacaaggtactttccctcttctctcaggccatgcatttgaataaagtgcctcccttagcctgagctcctaaagacctcttgtacttggttgcaaactcagatctctagtctagtctagtctagtctagtctagtcatgtgtgactgtgtactgagataccactagcccagtttgctgggtctctatgttttggaagttgggggtttaataatatttaatgtctttttaggatcataaacataaataggtttgttgatattcaggccttcagaatttaagggttttaaatatagcattcagattgtaattggtatgtttttgccatctggtccactcaattgtatatttttattttgcaaaacaacccaaaacttactttatgttgctttgttcagtaccttttgaattcccccagaagagttgttttcaaaacaaacattccagaatgaatgtcgctcttcaatggaacgtctttattgtgcttgaagtatttcttctctggttgtaattctaaattacagagtcatttgagctttctcccctcccgctagtatctttacaggagcagggaagagcagtagaggatgtataattttgggcgaagttaaattacaatttatttgaggttattcctaaacctatttatttggtgttttggaggagatcacacactaagagaacgttgattgcctcggctattgtgctggctggacactttggtcacttttgaagcatgttaataaatgtcactgattaaaacagctggagcatttccttccctttccagtgaaggagcagcatagtgaaatcctggcacccctcacctttttgtgatgacaagatggctgacagtcacggagtccaggagaaggtgctgctctccttgctttctgagtaaacagagtaatgttttttttcttattttcccaaagaaagaaaagggggaaaatatatttgtatgtttagaccagccaaattctgtcattattttagtatcaacctgctgtatattagagcaactgaatataatatggaataagtttgaccaggtcaagttttaggatatagttgaatttctttaaaaagttttctattttatctaaaatctttctattatatctaaattagaatgatcatcctgcgcaaattcagattactgtttgctggctaattgacagtatttctcagcatcactatgtagcattctgttttagcatctttgaattatgatcatttgatttggctaattacaaaaagtacaggtttaaactggacttaccttgagttaaaggcaaagaaaatctaaaaacataaatgttatatttcacaagaaatcagttgcatattatccattacatatttagttttaaaaggaggagtcaccttgaattattttctgagtcaccttgagttatttgatctctcagcctgctttctcatctgtaaaaaaggggggaggataactttcacagggtaattggtaggctaaataggagttacagaaaactgttaaatagggaagaactacattaaatttaaatattcacatt

SEQ ID NO: 354 - protein, 120 aa, Homo sapiens
MDDSKVVGGKVKKPGKRGRKPAKIDLKAKLERSRQSARECRARKKLRYQYLEELVSSRERAICALREELEMYKQWCMAMDQGKIPSEIKALLTGEEQNKSQQNSSRHTKAGKTDANSNSW

SEQ ID NO: 355 - DNA, 1646 bp, Homo sapiens
ggctctggcacccagggtccggcctgcgccttcccgccaggcctggacactggttcaacacctgtgacttcatgtgtgcgcgccggccacacctgcagtcacacctgtagccccctctgccaagagatccataccgaggcagcgtcggtggctacaagccctcagtccacacctgtggacacctgtgacacctggccacacgacctgtggccgcggcctggcgtctgctgcgacaggagcccttacctcccctgttataacacctgaccgccacctaactgcccctgcagaaggagcaatggccttggctcctgagagggcagccccacgcgtgctgttcggagagtggctccttggagagatcagcagcggctgctatgaggggctgcagtggctggacgaggcccgcacctgtttccgcgtgccctggaagcacttcgcgcgcaaggacctgagcgaggccgacgcgcgcatcttcaaggcctgggctgtggcccgcggcaggtggccgcctagcagcaggggaggtggcccgccccccgaggctgagactgcggagcgcgccggctggaaaaccaacttccgctgcgcactgcgcagcacgcgtcgcttcgtgatgctgcgggataactcgggggacccggccgacccgcacaaggtgtacgcgctcagccgggagctgtgctggcgagaaggcccaggcacggaccagactgaggcagaggcccccgcagctgtcccaccaccacaggcccagggctccctgctggggagctgtacgggtgggcagtagagacgacccccagccccgggccccagcccgcggcactaacgacaggcgaggccgcggccccagagtccccgcaccaggcagagccgtacctgtcaccctccccaagcgcctgcaccgcggtgcaagagcccagcccaggggcgctggacgtgaccatcatgtacaagggccgcacggtgctgcagaaggtggtgggacacccgagctgcacgttcctatacggccccccagacccagctgtccgggccacagacccccagcaggtagcattccccagccctgccgagctcccggaccagaagcagctgcgctacacggaggaactgctgcggcacgtggcccctgggttgcacctggagcttcgggggccacagctgtgggcccggcgcatgggcaagtgcaaggtgtactgggaggtgggcggacccccaggctccgccagcccctccaccccagcctgcctgctgcctcggaactgtgacacccccatcttcgacttcagagtcttcttccaagagctggtggaattccgggcacggcagcgccgtggctccccacgctataccatctacctgggcttcgggcaggacctgtcagctgggaggcccaaggagaagagcctggtcctggtgaagctggaaccctggctgtgccgagtgcacctagagggcacgcagcgtgagggtgtgtcttccctggatagcagcagcctcagcctctgcctgtccagcgccaacagcctctatgacgacatcgagtgcttccttatggagctggagcagcccgcctagaacccagtctaatgagaactccagaaagctggagcagcccacctagagctggccgcggccgc

SEQ ID NO: 356 - protein, 164 aa, Homo sapiens
MALAPERAAPRVLFGEWLLGEISSGCYEGLQWLDEARTCFRVPWKHFARKDLSEADARIFKAWAVARGRWPPSSRGGGPPPEAETAERAGWKTNFRCALRSTRRFVMLRDNSGDPADPHKVYALSRELCWREGPGTDQTEAEAPAAVPPPQAQGSLLGSCTGGQ

SEQ ID NO: 357 - DNA, 3302 bp, Homo sapiens
cggtgctgccgccgttgccgggagccgcggagacaagtcattacgttttcatttctcacaactgggctgagcacaactgaaccatgggggaacacagtccagacaacaacatcatctactttgaggcagaggaagatgagctgacccccgatgataaaatgctcaggtttgtggataaaaacggactggtgccttcctcatctggaactgtttatgataggaccactgttcttattgagcaggaccctggcactttggaggatgaagatgacgacggacagtgcggagaacacttgccttttctagtagggggtgaagagggctttcacctgatagatcatgaagcaatgtcccagggttatgtgcagcacattatctcaccagatcagattcatttgacaataaaccctggttccacacccatgccaagaaatattgaaggtgcaaccctcactctgcagtcggaatgtccggaaacaaaacgtaaagaagtaaagcggtaccaatgtacctttgagggctgtccccgcacctacagcacagcaggcaacctgcgaacccaccagaagactcaccgaggagagtacacctttgtctgtaatcaggagggctgtggcaaagccttccttacctctcacagcctcaggatccacgtgcgagtgcacacgaaggagaagccatttgagtgtgacgtgcagggctgtgagaaggcattcaacacactgtacaggctgaaagcacatcagaggcttcacacagggaaaacgtttaactgtgaatctgaaggctgcagcaaatacttcaccacactcagtgatctgaggaagcacattcgaactcatacaggggaaaagccatttcggtgcgatcacgatggctgtggaaaagcatttgcagcaagccaccaccttaaaactcacgttcgtacacatactggtgaaagacccttcttctgccccagtaatggctgtgagaaaacattcagcactcaatacagtctcaaaagtcacatgaaaggtcatgataacaaaggacactcatacaatgcacttccacaacacaatggatcagaggatacaaatcactcactttgtctaagtgacttgagccttctgtccacagattctgaattgcgagaaaattccagtacgacccagggccaggacctcagcacaatttcaccagcaatcatctttgaatcaatgttccagaattcagatgatacggcaattcaggaagatcctcaacagacagcttccttgactgaaagttttaatggtgatgcagagtcagtcagtgatgttccgccatccacaggaaattcagcatctttatctcttccacttgtactgcaacctggcctctccgagccaccccagcctctactacctgcctcagctccgtctgctcctccgcctgctccctccctaggacctggctcccagcaagctgcatttggcaacccccctgctctcttacaacctccagaagtgcctgttccccacagcacacagtttgctgctaatcatcaagagtttcttccgcacccccaggcaccgcagcccattgtaccaggactttctgttgttgctggggcttctgcatcagcagcggcagtggcatcagctgtggcagcaccagccccaccacaaagtactactgagcccctgccagccatggtccagactctgcccctgggtgccaactctgtcctaactaataatcccacaataaccatcaccccaactcccaacacagctatcctgcagtccagcctagtcatgggagaacagaacttacaatggatattaaatggtgccaccagttctccacaaaaccaagaacaaattcagcaagcatctaaagttgagaaggtgttttttaccactgcagtaccagtagccagtagcccagggagctctgtccagcagattggcctcagtgttcctgtgatcatcatcaaacaagaagaggcatgtcagtgtcagtgtgcatgccgggactctgcaaaggagcgggcatccagcaggagaaagggctgctcctccccaccccctccagagccgagcccccaggctcctgatgggcccagcctgcagctcccagcgcagactttctcttcagcccctgttcccgggtcatcatcctctaccttgccctcctcctgtgagcaaagccgacaagcagagactccttcagaccctcagacagaaacattaagtgccatggatgtgtcagagtttctatccctccagagcctggacaccccgtccaatctgattcccattgaagcactactgcagggggaggaggagatgggcctcaccagcagcttctccaagtgaagggcccatgtgtgctcacctctgggaaaagcgggtgagcaggaggcatgaggtacaatgcctgccatcatgggtcagaaatttgaaggatgaagaaatctactgtttgaaatcctcacctttcagacgtattttctttattcacatcccaggagcatccattttaaggaactattctttggaaaaaaacaaaaaacaaaaaaaacaacaaaaaaagctaagttataagtgaactgtttggctgcactgtatgtcacttttgcttgttgtcatgtgaacttggaaactaaggttactcgtgtgcataaaaattctaaatgaaagggtgtggtttccatcaatctgatgctgcccatcgcttgcactggggtctttgtggatcgggcaggagttttcagtgtgttgggtgttgctccttcctatgtgtcttttgaatctgaggctgacatttgcttggaaggccagacccttgctccatcagagagggcagtggcaaaggccagtgaggcagctgtgagttggacagggttcaggtgagatggtgttgtcatttgtgcttagtgttggtggtgctcagggtggataacacgggtcgttctgcagcccgcttcagcacaaataggcagcttaaggcctggctcacaggctgtggggttgatctggctctgcagaggccctaggcagcttgttgactgctgtctgttgatgacgtgtgtgcaaagcaggctctagcaacatgatcactgtccttgccttcctggttctttctctcggttggttgccagggcttgcagatcgcagtgaattttccttggggaacatcgctgttttgtcctagagtgaacttgtggcttatggccagtgctgtttggtggtctgccttctttttaatggtattttcttcctcagagcagaagggctgcattttgcttatcagaagaaggtgcagatttaagg

SEQ ID NO: 358 - protein, 753 aa, Homo sapiens
MGEHSPDNNIIYFEAEEDELTPDDKMLRFVDKNGLVPSSSGTVYDRTTVLIEQDPGTLEDEDDDGQCGEHLPFLVGGEEGFHLIDHEAMSQGYVQHIISPDQIHLTINPGSTPMPRNIEGATLTLQSECPETKRKEVKRYQCTFEGCPRTYSTAGNLRTHQKTHRGEYTFVCNQEGCGKAFLTSHSLRIHVRVHTKEKPFECDVQGCEKAFNTLYRLKAHQRLHTGKTFNCESEGCSKYFTTLSDLRKHIRTHTGEKPFRCDHDGCGKAFAASHHLKTHVRTHTGERPFFCPSNGCEKTFSTQYSLKSHMKGHDNKGHSYNALPQHNGSEDTNHSLCLSDLSLLSTDSELRENSSTTQGQDLSTISPAIIFESMFQNSDDTAIQEDPQQTASLTESFNGDAESVSDVPPSTGNSASLSLPLVLQPGLSEPPQPLLPASAPSAPPPAPSLGPGSQQAAFGNPPALLQPPEVPVPHSTQFAANHQEFLPHPQAPQPIVPGLSVVAGASASAAAVASAVAAPAPPQSTTEPLPAMVQTLPLGANSVLTNNPTITITPTPNTAILQSSLVMGEQNLQWILNGATSSPQNQEQIQQASKVEKVFFTTAVPVASSPGSSVQQIGLSVPVIIIKQEEACQCQCACRDSAKERASSRRKGCSSPPPPEPSPQAPDGPSLQLPAQTFSSAPVPGSSSSTLPSSCEQSRQAETPSDPQTETLSAMDVSEFLSLQSLDTPSNLIPIEALLQGEEEMGLTSSFSK

SEQ ID NO: 359 - DNA, 1805 bp, Homo sapiens
tgtttactttggttgtcccttctggcatggtgcatatgttatgggaagagggattataatttggtgctgtttgtagagatgacaacactgataaaatccactcattgctggtcccagcacacctggaaagttctgcaaggcctcagctacagaaagcccagagacagaaagtaaactctttcatgacccttgatcatcagatcatcaatccaactcttaaatggtcacaacctgcagtgccaagtggtgggcctcttgtgcagcatgcacacacaactctggacagtgatgctggcctcacagaaaacccactcaccaagttactagctattgggaaagaagatgacaatgcacaatggcatatggaggacgttattgaggatataatcggtatggaatcaagttttaaagaggaaggagcagactctcctctgctaatgcaaagaacattatctggaagtattttggatgtgtatagcggtgaacaaggaatttcaccaattaacatggggcttacaagtgcttcttgtccaagtagtctaccaatgaaaagagaaattacagaaactgacactagagctttagcaaaagagagacaaaaaaaggacaaccacaacctcattgaaagaagaagaaggtataatattaattaccgaatcaaggagcttggcactcttattccaaagtctaatgatcctgatatgcgctggaacaaaggaaccattctaaaagcatcagtggagtacatcaagtggctacaaaaagaacaacagagagcccgagaattggaacacagacagaagaaattagagcaggctaacaggcgacttctacttcggattcaggaactagaaattcaggctcgtactcatggtctgccaaccctggcttcacttggcacggttgatttaggtgctcatgtcaccaaacagcagagccatcctgagcagaattcagtagactattgccaacaactgactgtgtctcaggggccaagccctgagctctgtgatcaagctatagccttttctgatcctttgtcatacttcacagatttatcatttagtgctgcattgaaagaggaacaaagattggatggcatgctattggatgacacaatctctccatttggaacagatcctctgctatctgccacttcccctgcagtttccaaagaaagcagtaggagaagtagctttagctcagatgatggtgatgaattataagaaataaacagacccaattcatcaactggaaagcaattctatgctggtgctatgcaattatgctctgtgtttcatatgttgctttggcttattttttttcttaaaggaatgtgttgttcatgaaaaactgatagaagcaacagaagaattcgcaggaagaaaaatcatagtgttaatgaattattgagggcgaaaaaaaggtgttttcttctttgactacggagtccaaatccacttaaattctgttttcctgaaaagaggtacagcataagaaatagctctttattgatgttttaaaagcagcaacttggtggtgtactactggaactaatgactgcaaagtgttaaacgactgaaatatacaaacagtctcttagttactcatttccatcttctcttcaactttcacatcagtcttccggaatcaagatcaacatatcaggtggtcattgcctttctccattgtctagtagacatgtctaaagttcaaactttataggataaataaatgtataatagattatctgtcacttgtggttgaaaggcaaatctacaataaatgtgagaattttccacaat

SEQ ID NO: 360 - protein, 347 aa, Homo sapiens
MTLDHQIINPTLKWSQPAVPSGGPLVQHAHTTLDSDAGLTENPLTKLLAIGKEDDNAQWHMEDVIEDIIGMESSFKEEGADSPLLMQRTLSGSILDVYSGEQGISPINMGLTSASCPSSLPMKREITETDTRALAKERQKKDNHNLIERRRRYNINYRIKELGTLIPKSNDPDMRWNKGTILKASVEYIKWLQKEQQRARELEHRQKKLEQANRRLLLRIQELEIQARTHGLPTLASLGTVDLGAHVTKQQSHPEQNSVDYCQQLTVSQGPSPELCDQAIAFSDPLSYFTDLSFSAALKEEQRLDGMLLDDTISPFGTDPLLSATSPAVSKESSRRSSFSSDDGDEL

SEQ ID NO: 361 - DNA, 2761 bp, Homo sapiens; identical to SEQ ID NO: 69

SEQ ID NO: 362 - protein, 748 aa, Homo sapiens; identical to SEQ ID NO: 70

SEQ ID NO: 363 - DNA, 3291 bp, Homo sapiens
aagtcgcgaccagagccattggagggcgcggggactgcaaccctaatcagagcccaaatggcgcagtgggaaatgctgcagaatcttgacagcccctttcaggatcagctgcaccagctttactcgcacagcctcctgcctgtggacattcgacagtacttggctgtctggattgaagaccagaactggcaggaagctgcacttgggagtgatgattccaaggctaccatgctattcttccacttcttggatcagctgaactatgagtgtggccgttgcagccaggacccagagtccttgttgctgcagcacaatttgcggaaattctgccgggacattcagcccttttcccaggatcctacccagttggctgagatgatctttaacctccttctggaagaaaaaagaattttgatccaggctcagagggcccaattggaacaaggagagccagttctcgaaacacctgtggagagccagcaacatgagattgaatcccggatcctggatttaagggctatgatggagaagctggtaaaatccatcagccaactgaaagaccagcaggatgtcttctgcttccgatataagatccaggccaaagggaagacaccctctctggacccccatcagaccaaagagcagaagattctgcaggaaactctcaatgaactggacaaaaggagaaaggaggtgctggatgcctccaaagcactgctaggccgattaactaccctaatcgagctactgctgccaaagttggaggagtggaaggcccagcagcaaaaagcctgcatcagagctcccattgaccacgggttggaacagctggagacatggttcacagctggagcaaagctgttgtttcacctgaggcagctgctgaaggagctgaagggactgagttgcctggttagctatcaggatgaccctctgaccaaaggggtggacctacgcaacgcccaggtcacagagttgctacagcgtctgctccacagagcctttgtggtagaaacccagccctgcatgccccaaactccccatcgacccctcatcctcaagactggcagcaagttcaccgtccgaacaaggctgctggtgagactccaggaaggcaatgagtcactgactgtggaagtctccattgacaggaatcctcctcaattacaaggcttccggaagttcaacattctgacttcaaaccagaaaactttgacccccgagaaggggcagagtcagggtttgatttgggactttggttacctgactctggtggagcaacgttcaggtggttcaggaaagggcagcaataaggggccactaggtgtgacagaggaactgcacatcatcagcttcacggtcaaatatacctaccagggtctgaagcaggagctgaaaacggacaccctccctgtggtgattatttccaacatgaaccagctctcaattgcctgggcttcagttctctggttcaatttgctcagcccaaaccttcagaaccagcagttcttctccaacccccccaaggccccctggagcttgctgggccctgctctcagttggcagttctcctcctatgttggccgaggcctcaactcagaccagctgagcatgctgagaaacaagctgttcgggcagaactgtaggactgaggatccattattgtcctgggctgacttcactaagcgagagagccctcctggcaagttaccattctggacatggctggacaaaattctggagttggtacatgaccacctgaaggatctctggaatgatggacgcatcatgggctttgtgagtcggagccaggagcgccggctgctgaagaagaccatgtctggcacctttctactgcgcttcagtgaatcgtcagaagggggcattacctgctcctgggtggagcaccaggatgatgacaaggtgctcatctactctgtgcaaccgtacacgaaggaggtgctgcagtcactcccgctgactgaaatcatccgccattaccagttgctcactgaggagaatatacctgaaaacccactgcgcttcctctatccccgaatcccccgggatgaagcttttgggtgctactaccaggagaaagttaatctccaggaacggaggaaatacctgaaacacaggctcattgtggtctctaatagacaggtggatgaactgcaacaaccgctggagcttaagccagagccagagctggagtcattagagctggaactagggctggtgccagagccagagctcagcctggacttagagccactgctgaaggcagggctggatctggggccagagctagagtctgtgctggagtccactctggagcctgtgatagagcccacactatgcatggtatcacaaacagtgccagagccagaccaaggacctgtatcacagccagtgccagagccagatttgccctgtgatctgagacatttgaacactgagccaatggaaatcttcagaaactgtgtaaagattgaagaaatcatgccgaatggtgacccactgttggctggccagaacaccgtggatgaggtttacgtctcccgccccagccacttctacactgatggacccttgatgccttctgacttctaggaaccacatttcctctgttcttttcatatctctttgcccttcctactcctcatagcatgatattgttctccaaggatgggaatcaggcatgtgtcccttccaagctgtgttaactgttcaaactcaggcctgtgtgactccattggggtgagaggtgaaagcataacatgggtacagaggggacaacaatgaatcagaacagatgctgagccataggtctaaataggatcctggaggctgcctgctgtgctgggaggtataggggtcctgggggcaggccagggcagttgacaggtacttggagggctcagggcagtggcttctttccagtatggaaggatttcaacattttaatagttggttaggctaaactggtgcatactggcattggccttggtggggagcacagacacaggataggactccatttctttcttccattccttcatgtctaggataacttgctttcttctttcctttactcctggctcaagccctgaatttcttcttttcctgcaggggttgagagctttctgccttagcctaccatgtgaaactctaccctgaagaaagggatggataggaagtagacctctttttcttaccagtctcctcccctactctgccccctaagctggctgtacctgttcctcccccataaaatgatcctgccaatct

SEQ ID NO: 364 - protein, 851 aa, Homo sapiens
MAQWEMLQNLDSPFQDQLHQLYSHSLLPVDIRQYLAVWIEDQNWQEAALGSDDSKATMLFFHFLDQLNYECGRCSQDPESLLLQHNLRKFCRDIQPFSQDPTQLAEMIFNLLLEEKRILIQAQRAQLEQGEPVLETPVESQQHEIESRILDLRAMMEKLVKSISQLKDQQDVFCFRYKIQAKGKTPSLDPHQTKEQKILQETLNELDKRRKEVLDASKALLGRLTTLIELLLPKLEEWKAQQQKACIRAPIDHGLEQLETWFTAGAKLLFHLRQLLKELKGLSCLVSYQDDPLTKGVDLRNAQVTELLQRLLHRAFVVETQPCMPQTPHRPLILKTGSKFTVRTRLLVRLQEGNESLTVEVSIDRNPPQLQGFRKFNILTSNQKTLTPEKGQSQGLIWDFGYLTLVEQRSGGSGKGSNKGPLGVTEELHIISFTVKYTYQGLKQELKTDTLPVVIISNMNQLSIAWASVLWFNLLSPNLQNQQFFSNPPKAPWSLLGPALSWQFSSYVGRGLNSDQLSMLRNKLFGQNCRTEDPLLSWADFTKRESPPGKLPFWTWLDKILELVHDHLKDLWNDGRIMGFVSRSQERRLLKKTMSGTFLLRFSESSEGGITCSWVEHQDDDKVLIYSVQPYTKEVLQSLPLTEIIRHYQLLTEENIPENPLRFLYPRIPRDEAFGCYYQEKVNLQERRKYLKHRLIVVSNRQVDELQQPLELKPEPELESLELELGLVPEPELSLDLEPLLKAGLDLGPELESVLESTLEPVIEPTLCMVSQTVPEPDQGPVSQPVPEPDLPCDLRHLNTEPMEIFRNCVKIEEIMPNGDPLLAGQNTVDEVYVSRPSHFYTDGPLMPSDF

SEQ ID NO: 365 - DNA, 1939 bp, Homo sapiens
ctcgaggccacgaaggcccccggggtcagcagaggggcgctcacgctctcgccacccacctcgctttctcaccccgcgcttcccggcctgggtttttagtcttccttggagcgctctctggcctccgcctccgccagggagcggaaggcggagacagcgagactggccaggggggaggaaagaggacgcgtgtgggcaagggggacaacgggatgtccacgggctcggtgagtgatccggaggagatggagcttcgggggctgcagcgggagtacccggtccccgcctccaagaggccgcccctccgcggcgtagagcgcagctacgcctcgcccagtgacaactcgtcggcagaggaggaggaccccgacggcgaggaggagcgctgcgctctgggcacagccggcagcgcggaaggctgcaagaggaagcggccccgtgtggctgggggcggcggcgcaggtggtagcgcgggcggtggtggcaagaagcccctcccggccaagggctcagccgcagagtgcaagcagtcgcagcggaacgcggccaacgcccgtgagcgtgcccggatgcgcgtgctgagcaaagccttctccaggctcaagaccagcctgccctgggtgccccccgacactaagctctccaagctggacacgctccggctggcttccagttacatcgctcacctgcggcagctgttgcaggaggaccgctatgagaacggctacgtgcacccagtgaacctgacatggccattcgtggtctcgggaagaccggcctctgcaccaaagaagtttccgcagccaacagactatgtggaaccaccgcttaaatcggactggaactcacttgatgggattattcgttaaatgcgagtgtttgggggccacggagagaagggagagctcgtgagatgggaagaagtttccgctggattctccttgacccttccccttgccctggaactgtgatcgtgacaggtggcgggtgtggctgtcactgcacagcgcccacggctacagctgcgccggatctgggcgaccacgttttgcctctccaaaaagagcttcctttcgtgacgagacgcggacgcaggtccaccctcgggccctagctctgtagactaactctcggctgctgccccagcccgcgccagacagcccacggatccgttctcagcggagccagattcatcgcacacgtgcgggacggttccacacagccccggcctttcgcggtgacacaatggttagggaacggttagacgcgctctacatccgctttaaagacagaggtctagacgtgagatccgcgtcgggacagggttttaagtgacaaagaagggcgagtggcttctctgggccgggttcgtactccagcacagcgcccttctaacgggcgggaggaaggccgctgctcgcagggctaggtggagacacacttcccagatcaccgcaggcgggttttacccggagagctctggccgttcggcctccctgccgggtggcttcttcaatcccgtctccttcccaagctcccggctttttctaatcaggcaggcgtctgtcaaccctctccacttctgggctgaagcctccccaagccccgtgcgccaacctgtgtggggtcttcttcgggcctccctctccgccccgctcctgctcctacctgcagcacccccagctccgactccagactctctgcatcaggtctccccactccacgctccgggcgccccaactccaacaccacgtcctgccgcgcaggttcttccccgcgcggaggagcgcgcagggtgggcggcttaccatagcaagtgatcctgcgatagggaacgcgcccttgccccgaggctgcactaccacaggaaataacggccttcgtggcctcgagttttttatgaataataaaacgcgctgtaaaaaccgtggacggaaaa

SEQ ID NO: 366 - protein, 218 aa, Homo sapiens
MSTGSVSDPEEMELRGLQREYPVPASKRPPLRGVERSYASPSDNSSAEEEDPDGEEERCALGTAGSAEGCKRKRPRVAGGGGAGGSAGGGGKKPLPAKGSAAECKQSQRNAANARERARMRVLSKAFSRLKTSLPWVPPDTKLSKLDTLRLASSYIAHLRQLLQEDRYENGYVHPVNLTWPFVVSGRPASAPKKFPQPTDYVEPPLKSDWNSLDGIIR

SEQ ID NO: 367 - DNA, 6295 bp, Homo sapiens
ctgccagatcagtttgtcaccacccaggctcccttgcctttggctgggtgcaacttccattttaggtgttggatctgagggggaaaaaaaagagagagggagagagagagaaagaagagcaggaaagatcccgaaaggaggaagaggtggcgaaaaatcaactgccctgctggatttgtctttctcagcaccttggcgaagccttgggtttctttcttaaaggactgatttttagaactccacatttgaggtgtgtggcttttgaagaaaatgtatgtactgacgggaaaaggaagataagcaagtcgaatttttgtcttacgctctctccttcctgcttcctccttgctgtggtggctgggatgctccttccatgattttttgaatctagactgggctgttctctgtgttaaaccaatcagttgcgaccttctcttaacagtgtgaagtgagggggtctctctccctccttctccttcctctgtgattcaccttcctttttaccctgccctgcggcggctccgccccttaccttcatggacgactcagaggtggagtcgaccgccagcatcttggcctctgtgaaggaacaagaggcccagtttgagaagctgacccgggcgctggaggaggaacggcgccacgtctcggcgcagctggaacgcgtccgggtctcaccacaagatgccaacccactcatggccaacggcacactcacccgccggcatcagaacggccggtttgtgggcgatgctgaccttgaaagacagaaattttcagatttgaaactcaacggaccccaggatcacagtcaccttctatatagcaccatccccaggatgcaggagccggggcagattgtggagacctacacggaggaggatcctgagggagccatgtctgtagtctctgtggagacctcagatgatgggaccactcggcgcacagagaccacggtcaagaaagtagtgaagactgtgacaacacggacagtacagccagtcgctatgggaccagacgggttgcctgtggatgcttcatcagtttctaacaactatatccagactttgggtcgtgatttccgcaagaatggcaatgggggacctggtccctatgtggggcaagctggcactgctacccttcctaggaacttccactaccctcctgatggttatagtcgccactatgaagatggttatccaggtggcagtgataactatggcagtctgtcccgggtgacccgcattgaggagcggtataggcccagcatggaaggctaccgggcacctagtagacaggatgtgtatgggccccaaccccaggttcgggtaggtgggagcagcgtggatctgcatcgctttcatccagagccttatgggctagaggatgaccagcgtagtatgggctatgatgacctggattatggtatgatgtctgattatggcactgcccgtcggactgggacaccctctgaccctcgtcggcgcctcaggagctatgaagacatgattggtgaggaggtgccatcggatcaatactactgggctcctttggcccagcatgagcgaggaagtttagcaagcttggatagcctgcgcaaaggagggcctccacctcctaattggagacagccagagctgccagaggtgatcgccatgcttggattccgcttggatgctgtcaagtccaatgcagctgcatacctgcaacacttatgctaccgcaatgacaaggtgaagactgacgtgcggaagctcaagggcatcccagtactggtgggattgttagaccatcccaaaaaggaagtgcaccttggagcctgtggagctctcaagaatatctcttttggacgtgaccaggataacaagattgccataaaaaactgtgatggtgtgcctgcccttgtgcgattgcttcgaaaggctcgtgatatggaccttactgaagttattaccggaaccctgtggaatctttcatcccatgactcaatcaaaatggagattgtggaccatgcactgcatgccttgacagatgaagtgatcattcctcattctggttgggagcgggaacctaatgaagactgtaagccacgccatattgagtgggaatcggtgctcaccaacacagctggctgccttaggaatgtaagctcagagaggagtgaagctcgccggaaacttcgggaatgtgatggtttagttgatgccctcattttcattgttcaggctgagattgggcagaaggattcagacagcaagcttgtagagaactgtgtttgccttcttcggaacttatcatatcaagttcaccgggagatcccacaggcagagcgttaccaagaggcagctcccaatgttgccaacaatactgggccacatgctgccagttgctttggggccaagaagggcaaagggaaaaaacctatagaggatccagcaaacgatacagtggatttccctaaaagaacgagtccagctcgaggctatgagctcttatttcagccagaggtggttcggatatacatctcacttcttaaggagagcaagactcctgccatcctagaagcctcagctggagctatccagaacttgtgtgctgggcgctggacgtatggtcgatacatccgctctgctctgcgtcaagagaaggctctttctgccatagctgacctcctgactaatgaacatgaacgggtggtgaaagctgcatctggagcactgagaaacctggctgtggatgctcgcaacaaagaattaattggtaaacatgctattcctaacttggtaaagaatctgccaggaggacagcagaactcctcttggaatttctctgaggacactgtcatctctattttgaacactatcaacgaggttatcgctgagaacttggaggctgccaaaaagcttcgagagacacagggtattgagaagctggtgttgatcaacaaatcagggaaccgctcagaaaaagaagttcgagcagcagcacttgtattacagacaatctggggatataaggaactgcggaagccactggaaaaagaaggatggaagaaatcagactttcaggtgaatctaaacaatgcttcccgaagccagagcagtcattcatatgatgatagtactctccctctcattgaccggaaccaaaaatcagataagaaacctgatcgggaagaaattcagatgagcaatatgggatcaaacacaaaatcactagataacaactattccacaccaaatgagagaggagaccacaatagaacactggatcgatcgggggatctaggcgacatggagccattgaagggaacaacacccttgatgcaggacgaggggcaggaatctctggaggaagagttggatgtgttggttttggatgatgaggggggccaagtgtcttacccctccatgcagaagatttagcaccactatctccgttccatctgggcttatatgtacttttattttttggtggtgaaattgactgatgattttcctttttcttcgctggactattgtgccaactgccaggctgcctcctgcccttacagccctaagtggctgccttctttccatcaactcccaacttcttcctgtgaagtttaattgtctcaacgcctccccctcccccattccctccatttttctcccaagaaacctgactcaattatttgcatattttgagaaactgctgcagattagttctttttgccagttttccctggaactcctggccttttgtggaggggagggatggagagaataggaatcttcactagaagccgtgggaagaattggaagttacatgctgtatatgcaatgtccagcagtctgataaactgacgattcttaatcaagatttttttcctgatggggaagggacttttattttcttttagagaggggaaagtgtgagctcttcccttattcctaatggctatttttgaagcaaagaaggccagcaacattggcacatgccacctggcaaaggacccttgagtaagtgaaggtctcctaaaactgggattaagaaaccttgctctcctcatctccaaggcagggaccatcaagaacctacagactccatctcttctgcaagcctcatgccaaccctgggctattgctgctgccccttaaacacaggctgtccttaacccacctctcctgccctgtgatatgtctgctgagttggcctggccatttccaagaggctgtagaaaggggagaatgtcaaggaagacttttggtagagaaggagcagaaagatgtgtttttgggaagaagaagacctctaggaggagctagtaggaatgtacatgaagcaattagtctgaaactggcttccccactcccccgtttctccttttcctatccttataggcctgtcccttgcctctgccctggattggttggcaaactataggacttgatgtacataactcctgtcccttttcccttacaaggtggggattgcccctggctttgcctcttctttgtgcctttggcctggggtgcatctcctcccgcccttccatgtgcctttctttgcctctgcagtctcatttctcataattttgcaaattatattttgttgctttcttacctactattggccctaaatagcagaaagaagagaagtgaccgagagaacctcagattcttcattgaggattggtatagccatgatttcagtcatagcaagcttttgctcaacagcatatgggtgggatttggcaaaaatcctattctgatgaatctcaaagtaaggctggtaagagaagtgagtggtgtgactcttactccttaggtgcccagaatttaccatcatctctgaaggagttacagggaagtggtctccccaattctcccctccctccagtattgccccctctcactttagcatatattaattagcaggttgggctagagaaatcagctgctatgcgggttgattattattattatttctaatccttttccttatttgccttctactccccttaatctaatctaaaagctctgttccatgcaactggagttccttatccctctcttccccttcccttatatattgaggctatggggtaggagaaaagtgcacaacccaccaccccctctactcgtgcattaaaatttcttatttacccttttcccccttcccatttcttcccactttcatctaccttttctggcaaaaaggagccttttgctctctgtgaccctaagagcacactgcacagggaaaattgccccatccagacctggctccactcttgatctctcttgtcctcttctgctcttttcctggtgctcttttttctcggtggggtgtgggtaatagaacagccgtgggcttttggggacctttaacttttttttctctcttttgtttataaaaaacactaaacattcaattccagagaacccaaaatcccaccttcccaccgaacactactaaggggcttgtgttctgctccataccttttctcttttctttctgtcttgttaatgcttttaaaaacaaatgagttttttatataaataaagtttttaaagtgtgtatgtggggggtctgtgtcatttcttcacttcaagctgttatttcttccctgctttgcatctttgttacttccttatgtatcagtgtcctttccagagcaaccagaaggaggttataccaggatttattttgagctcagccccaactctttatcaagcaacattcttgttaactatatgtgaaacattttttcttctgaagattcttaaaaattgaatgtggctgaagttgaacatgggagcttattgctaatttagagataggaaactgaagcataaagaattaatgacttactttaattactggaattcttctgcaacatttgacaaaactaaccttgaataaggcccactgtaatacgtagctctcttaaatataacacttaggactagaagattagaaactaccaatcccaactacgtaataggaaaatgtaggatcaaaaggcccatgtatataagtactgaccactgggccataatgttgcttctcaggctatatgcagtcctttagtcagaagtcaataggcctatttattaatattttacagaccatattacctggattaccagggactatctttgctgcagagatcaagggttaagatctatgggaagatacttatttttctgaggtccttatgtcctgtcatataattaaagactcaagagaatttatgtgaaatgctttctgtatgccccaatctttagattaaaattatatacctgctcct

SEQ ID NO: 368 - protein, 962 aa, Homo sapiens
MDDSEVESTASILASVKEQEAQFEKLTRALEEERRHVSAQLERVRVSPQDANPLMANGTLTRRHQNGRFVGDADLERQKFSDLKLNGPQDHSHLLYSTIPRMQEPGQIVETYTEEDPEGAMSVVSVETSDDGTTRRTETTVKKVVKTVTTRTVQPVAMGPDGLPVDASSVSNNYIQTLGRDFRKNGNGGPGPYVGQAGTATLPRNFHYPPDGYSRHYEDGYPGGSDNYGSLSRVTRIEERYRPSMEGYRAPSRQDVYGPQPQVRVGGSSVDLHRFHPEPYGLEDDQRSMGYDDLDYGMMSDYGTARRTGTPSDPRRRLRSYEDMIGEEVPSDQYYWAPLAQHERGSLASLDSLRKGGPPPPNWRQPELPEVIAMLGFRLDAVKSNAAAYLQHLCYRNDKVKTDVRKLKGIPVLVGLLDHPKKEVHLGACGALKNISFGRDQDNKIAIKNCDGVPALVRLLRKARDMDLTEVITGTLWNLSSHDSIKMEIVDHALHALTDEVIIPHSGWEREPNEDCKPRHIEWESVLTNTAGCLRNVSSERSEARRKLRECDGLVDALIFIVQAEIGQKDSDSKLVENCVCLLRNLSYQVHREIPQAERYQEAAPNVANNTGPHAASCFGAKKGKGKKPIEDPANDTVDFPKRTSPARGYELLFQPEVVRIYISLLKESKTPAILEASAGAIQNLCAGRWTYGRYIRSALRQEKALSAIADLLTNEHERVVKAASGALRNLAVDARNKELIGKHAIPNLVKNLPGGQQNSSWNFSEDTVISILNTINEVIAENLEAAKKLRETQGIEKLVLINKSGNRSEKEVRAAALVLQTIWGYKELRKPLEKEGWKKSDFQVNLNNASRSQSSHSYDDSTLPLIDRNQKSDKKPDREEIQMSNMGSNTKSLDNNYSTPNERGDHNRTLDRSGDLGDMEPLKGTTPLMQDEGQESLEEELDVLVLDDEGGQVSYPSMQKI

SEQ ID NO: 369 - DNA, 2873 bp, Homo sapiens
gactaatggccctaactaagtattaacccctgccaagaaaagagctacttcctcttgaagtaaatgaagatagtgatgctttctcttaaactttacttataaaaagcatcaaaggggggaatgaagcaggaaatataaaaggaaaaacaagtaaagggaaaacaagtcctttcctgaccagtctgactcactccaaagtcctgctggagctatgataattatctgcaaggccaggcaggggctccgaaggagggctccaggagcagggatgagaaaaacaagttctccttatcagtttccctgtttgaaattctctccccataacattattctttgttctgctctcacaactatttttgtaactatttctgcaagtctgtaaagattttgtaagttcttgtttttctttctgtagcatggcaaggtcacaagacatgtttaagtaaggtaggctcatgttgcaaatcctgttgtaaaacctgtcaacggtatgattaactgcctttgttctgcttctgtaagactgctttctcacctcgcaggttttgcgccaaaaacccgacttgcccctgcctgatgcatgtataaaagtcaagccctgtctttgttccgggctcagcctttggatgttaatccgctgggccagtggccacctaaataaaaccttcctgttgcacccagtgatctctccggcctcctggttcccacaacatataagcattccttttctctgcaacctagcccgcatctgtcattgactttttgaacaataggcattctgactggatgagatggtatctcactgtggtttttctctgcatttttctaataattaacaacgtgaattttgttttcatgtgcttgtcagccacatgtatgtcttcttttgaaaagtatctgttcatgtttttgcttactttttaattaggtttttggttttctttttgttgttgttgttgttttctgagatggagtcttgctgtgtcaccaggatggagtgcagtggcatgatctcgactcactgcaacctccacctcccaggttcagatgattcttctgcttcagtctcctgagtagctgggatcacagggaccattgacatttatggatgtggccatagaattctctttggaggagtggcaatgcctggacactgcacagcagaatttatataggcatgtgatgtgagagaactacagaaacctggttttcttgggtgaaggtattgctgtctctaaggcagacctgattacctgtctggagcaaggaaaagagccctggaatatgaagagacatgagatggtagctaaacatttagttatgttttattattttgcccaacacctttggccagagcagaacataagagattctttccagaaagtgaccctaagaagatatagaaaatgtggatatgagaatttacagttaagaaaaggctgtaaaagtgtggttgagtgtaaacagcacaaaggagattatagtggacttaaccaatgtttgaaaactaccttgagcaaaatatttcaatgtaataaatatgtagaagttttccataaaatttcaaattcaaatagacacaagatgagacatactgaaaataaacattttaaatgtaaagaatgtcgcaaaacattttgcatgctttcacacctaactcaacataaaagaatccaaactagagtgaatttctacaaatgtgaagcatatggaagagcctttaactggtcctcaacccttaataaacataagagaattcatactggagaaaaaccttacaaatgtaaagaatgtggcaaagcctttaaccagacctcacaccttattagacataagagaattcatactgaagagaaaccctacaaatgtgaagaatgtggcaaagcctttaaccagtcatcgacccttactacacataatataattcatactggggaaattccctacaaatgtgagaaatgtgttagagcttttaaccaagcctcaaagcttactgaacataagttaattcataccggagagaaacgttatgaatgtgaagaatgcggcaaagcttttaaccgatcctcaaaacttactgaacataagtacattcatactggagagaagctgtacaaatgtgaagaatgtggtaaagcctttaaccagtcctcaacccttactacacataagagaattcatagtggagagaagccctacaaatgtgaagaatgtggcaaagcttttaaacaattttcaaatcttactgaccataaaaaaattcatactggagagaaaccctacaaatgtgaggaatgtggcaaagcttttaaccaactctcaaaccttactagacataaggtaattcatactggagagaaaccctacaaatgtggagaatgtggcaaagcctttaaccagtcctcagcccttaatacacataagataatccatactggagagaatccccacaaatgtagagaatctggcaaagttttccacctatcctcaaaacttagtacatgtaagaaaattcatactggagagaaactctacaaatgtgaagaatgtggcaaagcctttaactgatcttcaacccttattggacataagagaattcatactggagagaaaccctacaaatgtgaagaatgtggcaaagcttttaaccaatcttcaacacttactacacataagataattcatactgaagagaaacagtacaaatgtgatgaatgtggcaaagcttctacctgatcctcaaaactcattgaacacaagaaaattcatactggagagaaaccttacaagtgtgaagaatgtggcaaaacttctaaccatttctcaacctttactaaacataagatgattcatactggagagaagttacacaa

SEQ ID NO: 370 - protein, 427 aa, Homo sapiens
MKRHEMVAKHLVMFYYFAQHLWPEQNIRDSFQKVTLRRYRKCGYENLQLRKGCKSVVECKQHKGDYSGLNQCLKTTLSKIFQCNKYVEVFHKISNSNRHKMRHTENKHFKCKECRKTFCMLSHLTQHKRIQTRVNFYKCEAYGRAFNWSSTLNKHKRIHTGEKPYKCKECGKAFNQTSHLIRHKRIHTEEKPYKCEECGKAFNQSSTLTTHNIIHTGEIPYKCEKCVRAFNQASKLTEHKLIHTGEKRYECEECGKAFNRSSKLTEHKYIHTGEKLYKCEECGKAFNQSSTLTTHKRIHSGEKPYKCEECGKAFKQFSNLTDHKKIHTGEKPYKCEECGKAFNQLSNLTRHKVIHTGEKPYKCGECGKAFNQSSALNTHKIIHTGENPHKCRESGKVFHLSSKLSTCKKIHTGEKLYKCEECGKAFN

SEQ ID NO: 371 - DNA, 2010 bp, Homo sapiens
attcattccctgtcctcggatcacagtctcttctcactacagtgtcgccgcctctgcctgcgtagccccggccatggctctgtagcctcgacccctttgtgcccccggcccgtctccgcgctcaccacgcctgcgctctccgctcccaccttctttcttcagccgaggccgccgccgcctctccttgctgcagccatggagtcttccactttcgccttggtgcctgtcttcgcccacctgagcatcctccagagcctcgtgccagctgctggtgcagcctctcctgttgccatcagtgcccagcacctgtgctacagccatgtcactcctggcgaccctggggctggagctggacagggccctgctcccagctagtgggctgggatggctcgtagactatgggaaactccccccggcccctgcccccctggctccctatgaggtccttgggggagccctggagggcgggcttccagtggggggagagcccctggcaggtgatggcttctctgactggatgactgagcgagttgatttcacagctctcctccctctggagcctcccctaccccccggcaccctcccccaaccttccccaaccccacctgacctggaagctatggcctccctcctcaagaaggagctggaacagatggaagacttcttcctagatgccccgcccctcccaccaccctccccgccgccactaccaccaccaccactaccaccagccccctccctccccctgtccctcccctcctttgacctcccccagccccctgtcttggatactctggacttgctggccatctactgccgcaacgaggccgggcaggaggaagtggggatgccgcctctgcccccgccacagcagccccctcctccttctccacctcaaccttctcgcctggccccctacccacatcctgccaccacccgaggggaccgcaagcaaaagaagagagaccagaacaagtcggcggctctgaggtaccgccagcggaagcgggcagagggtgaggccctggagggcgagtgccaggggctggaggcacggaatcgcgagctgaaggaacgggcagagtccgtggagcgcgagatccagtacgtcaaggacctgctcatcgaggtttacaaggcccggagccagaggacccgtagctgctagaagggcaggggtgtggcttctgggggctggtcttcagctctggcgccttcatccccctgcctctaccttcattccaaacccctctcggccgggtgcagtggcttatgcttgtaatcccagcactttgggaggccaaggcaggaggatcgtttgaggccaggaggtcaataccagcctgggcaacatagtaagaccctgtctctattaaaaaaaaaaaatcaacccttcttccccaccaaaccacccaactcctctctactcttatccttttatcctctgtctctgcttatcacctctcttgcgtatttctggatctccttccctcctttctcgtccaaatcatgaaatgtttggccttagtcaatgtctatgcccgtcacataacagccgaggcaccgaggcccacagggaagcagctgggagcttggaaacctggtctcttgaatttcaaacctggtttcttacaggtggttgtctggggtgggtggagtggcgacaggatagagctgaaggactatgcaaatgaggaagtaagtcagggcgggctttgagaaggggacccatatcctacaggcaaaaagcaggctaggtgaccttgggacactacgctaagggagggaggctaaaggcggccaggtttgcagtgcgggaagatgagcaggccagtgggaggaggggcagggcagggctgtagttggtgactgggtgttcattttagctctaagaaaaaaaatcagtgtttcgtgaaggtgttggagaggggctgtgtctgggtgagggatggcggggtactgatttttttgggaggttatgagcaaaaataaaacgaaacatttcctctg

SEQ ID NO: 372 - protein, 282 aa, Homo sapiens
MSLLATLGLELDRALLPASGLGWLVDYGKLPPAPAPLAPYEVLGGALEGGLPVGGEPLAGDGFSDWMTERVDFTALLPLEPPLPPGTLPQPSPTPPDLEAMASLLKKELEQMEDFFLDAPPLPPPSPPPLPPPPLPPAPSLPLSLPSFDLPQPPVLDTLDLLAIYCRNEAGQEEVGMPPLPPPQQPPPPSPPQPSRLAPYPHPATTRGDRKQKKRDQNKSAALRYRQRKRAEGEALEGECQGLEARNRELKERAESVEREIQYVKDLLIEVYKARSQRTRSC

SEQ ID NO: 373 - DNA, 1636 bp, Homo sapiens
gaattccggctctctgggtgagagaccgagaggggcatatccgttcacgccgatccatgaaaatgctttggaaattgacggataatatcaagtacgaggactgcgaggaccgtcacgacggcaccagcaacgggacggcacggttgccccagctgggcactgtaggtcaatctccctacacgagcgccccgccgctgtcccacacccccaatgccgacttccagcccccatacttccccccaccctaccagcctatctacccccagtcgcaagatccttactcccacgtcaacgacccctacagcctgaaccccctgcacgcccagccgcagccgcagcacccaggctggcccggccagaggcagagccaggagtctgggctcctgcacacgcaccgggggctgcctcaccagctgtcgggcctggatcctcgcagggactacaggcggcacgaggacctcctgcacggcccacacgcgctcagctcaggactcggagacctctcgatccactccttacctcacgccatcgaggaggtcccgcatgtagaagacccgggtattaacatcccagatcaaactgtaattaagaaaggccccgtgtccctgtccaagtccaacagcaatgccgtctccgccatccctattaacaaggacaacctcttcggcggcgtggtgaaccccaacgaagtcttctgttcagttccgggtcgcctctcgctcctcagctccacctcgaagtacaaggtcacggtggcggaagtgcagcggcggctctcaccacccgagtgtctcaacgcgtcgctgctgggcggagtgctccggagggcgaagtctaaaaatggaggaagatctttaagagaaaaactggacaaaataggattaaatctgcctgcagggagacgtaaagctgccaacgttaccctgctcacatcactagtagagggagaagctgtccacctagccagggactttgggtacgtgtgcgaaaccgaatttcctgccaaagcagtagctgaatttctcaaccgacaacattccgatcccaatgagcaagtgacaagaaaaaacatgctcctggctacaaaacagatatgcaaagagttcaccgacctgctggctcaggaccgatctcccctggggaactcacggcccaaccccatcctggagcccggcatccagagctgcttgacccacttcaacctcatctcccacggcttcggcagccccgcggtgtgtgccgcggtcacggccctgcagaactatctcaccgaggccctcaaggccatggacaaaatgtacctcagcaacaaccccaacagccacacggacaacaacgccaaaagcagtgacaaagaggagaagcacagaaagtgaggctctcctcccgccccgcccctcccacgcctcaccagccccccgcgcgcccaccctccggcgggtgacagctccgggatcagcaacccttcctgctgctgctactgctgctgctgctgccgccgccgccgccgccgctgcccttgggtccccccgagtctccgggactgccctctcgactgtcagtggggcagcctctccgactctgcacccgcctcgacctccccacccgctcccacacccctgtgcccccggaattc

SEQ ID NO: 374 - protein, 437 aa, Homo sapiens
MLWKLTDNIKYEDCEDRHDGTSNGTARLPQLGTVGQSPYTSAPPLSHTPNADFQPPYFPPPYQPIYPQSQDPYSHVNDPYSLNPLHAQPQPQHPGWPGQRQSQESGLLHTHRGLPHQLSGLDPRRDYRRHEDLLHGPHALSSGLGDLSIHSLPHAIEEVPHVEDPGINIPDQTVIKKGPVSLSKSNSNAVSAIPINKDNLFGGVVNPNEVFCSVPGRLSLLSSTSKYKVTVAEVQRRLSPPECLNASLLGGVLRRAKSKNGGRSLREKLDKIGLNLPAGRRKAANVTLLTSLVEGEAVHLARDFGYVCETEFPAKAVAEFLNRQHSDPNEQVTRKNMLLATKQICKEFTDLLAQDRSPLGNSRPNPILEPGIQSCLTHFNLISHGFGSPAVCAAVTALQNYLTEALKAMDKMYLSNNPNSHTDNNAKSSDKEEKHRK

SEQ ID NO: 375 - DNA, 4246 bp, Homo sapiens
  misc_feature (3300)..(3300): wherein "n" equals a, c, g, or t.
atcttttttcatcttctagctgtagctcgggctgcttgtcggcttggctccccctcccccctttgctctctgcctcgtctttccccaggacttcgctattttgcttttttaaaaaaaggcaagaaagaactaaactcccccctccctctcctccagtcgggctgcacctctgccttgcactttgcacagaggtagagagcgcgcgagggagagagaggaaagaaaaaaaataataaagagagccaagcagaagaggaggcgagaagcatgaagtgttaactcccccgtgccaaggcccgcgccgcccggacagacgcccgccgcgccttccagccccgagcggacgccgcgcgccgccctgcctgcagcccgggccggcgacggcgagcccttccttatgcaaagcgcgccagcagcgcgaaggcgggacgccgcgcaccgggccgggctcctccagcttcgccgccgcagccaccaccgccgccaccgcagctcgcggaggatcttcccgagcctgaagccgccggctcggcgcgcaaggaggcgagcgcaaggaggggccggggcgagcgagggagcacattggcgtgagcaggggggagggagggcgggcgcggggggcgcgggcagggcgggggggtgtgtgtgtgagcgcgcttggaggtttcgggccagccaccgccgcgcaagctagaagcgccccagcccggcaagctggctcacccgctggccacccagcacagcccgctggcccctctcctgcagcccatctggcggagcggcggcggcggcggcggcggcaggagaatggcatcagaactggcaatgagcaactccgacctgcccaccagtcccctggccatggaatatgttaatgacttcgatctgatgaagtttgaagtgaaaaaggaaccggtggagaccgaccgcatcatcagccagtgcggccgtctcatcgccgggggctcgctgtcctccacccccatgagcacgccgtgcagctcggtgcccccttcccccagcttctcggcgcccagcccgggctcgggcagcgagcagaaggcgcacctggaagactactactggatgaccggctacccgcagcagctgaaccccgaggcgctgggcttcagccccgaggacgcggtcgaggcgctcatcagcaacagccaccagctccagggcggcttcgatggctacgcgcgcggggcgcagcagctggccgcggcggccggggccggtgccggcgcctccttgggcggcagcggcgaggagatgggccccgcggccgccgtggtgtccgccgtgatcgccgcggccgccgcgcagagcggcgcgggcccgcactaccaccaccaccaccaccacgccgccggccaccaccaccacccgacggccggcgcgcccggcgccgcgggcagcgcggccgcctcggccggtggcgctgggggcgcgggcggcggtggcccggccagcgctgggggcggcggcggcggcggcggcggcggaggcggcgggggcgcggcgggggcggggggcgccctgcacccgcaccacgccgccggcggcctgcacttcgacgaccgcttctccgacgagcagctggtgaccatgtctgtgcgcgagctgaaccggcagctgcgcggggtcagcaaggaggaggtgatccggctgaagcagaagaggcggaccctgaaaaaccgcggctatgcccagtcctgccgcttcaagagggtgcagcagagacacgtcctggagtcggagaagaaccagctgctgcagcaagtcgaccacctcaagcaggagatctccaggctggtgcgcgagagggacgcgtacaaggagaaatacgagaagttggtgagcagcggcttccgagaaaacggctcgagcagcgacaacccgtcctctcccgagtttttcatgtgagtctgacacgcgattccagctagccaccctgataagtgctccgcgggggtccggctcgggtgtgggcttgctagttctagagccatgctcgccaccacctcaccacccccacccccaccgagtttggcccccttggccccctacacacacacaaacccgcacgcacacaccacacacacacacacacacacacacacacaccccacaccctgctcgagtttgtggtggtggtggctgttttaaactggggagggaatgggtgtctggctcatggattgccaatctgaaattctccataacttgctagcttgttttttttttttttttttacacccccccgccccaccccccggacttgcacaatgttcaatgatctcagcagagttcttcatgtgaaacgttgatcacctttgaagcctgcatcattcacatattttttcttcttcttccccttcagttcatgaactggtgttcattttctgtgtgtgtgtgtgttttattttgtttggatttttttttttaattttacttttagagcttgctgtgcttgcccacctcttttccaacctccaccctcactccttctcaacccatctcttccgagatgaaagaaaaaaaaaagcaaagtttttttttcttctcctgagttcttcagtgagattgagcttgcaaaggaaaaaaaaatgtgaaatgttatagacttgcagcgtgccgagttccatcgggttttttttttagcattgttatgctaaaatagagaaaaaaatcctcatgaaccttccacaatcaagcctgcatcaaccttctgggtgtgacttgtgagttttggccttgtgatgccaaatctgagagtttagtctgccattaaaaaaactcattctcatctcatgcattattatgcttgctactttgtcttagcaacaatgaactataactgtttcaaagactttatggaaaagagacattatattaataaaaaaaaaagcctgcatgctggacatatatggtataattattttttcctttttttttccttttggcttggaaatggacgttcgaagacttatagcatggcattcatacttttgttttattgcctcatgacttttttgagtttagaacaaaacagtgcaaccgtagagccttcttcccatgaaattttgcatctgctccaaaactgctttgagttactcagaacttcaacctcccaatgcactgaaggcattccttgtcaaagataccagaatgggttacacatttaacctggcaaacattgaagaactcttaatgttttctttttaataagaatgacgcccactttggggactaaaattgtgctattgccgagaagcagtctaaaatttatttttnaaaaagagaaactgccccattatttttggtttgttttatttttattttatattttttggcttttggtcattgtcaaatgtggaatgctctgggtttctagtatataatttaattctagtgtttataatctgttagcccagttaaaatgtatgctacagataaaggaatgttatagataaatttgaaagagttaggtctgtttagctgtagattttttaaacgattgatgcactaaattgtttactattgtgatgttaaggggggtagagtttgcaaggggactgtttaaaaaaagtagcttatacagcatgtgcttgcaacttaaatataagttgggtatgtgtagtctttgctataccactgactgtattgaaaaccaaagtattaagaggggaaacgcccctgtttatatctgtaggggtattttacattcaaaaatgtatgtttttttttcttttcaaaattaaagtatttgggactgaattgcactaagatataacctgcaagcatataatacaaaaaaaaattgcaaaactgtttagaacgctaataaaatttatgcagttataaaaatggcattactgcacagttttaagatgatgcagatttttttacagttgtattgtggtgcagaactggattttctgtaacttaaaaaaaatccacagttttaaaggcaataatcagtaaatgttattttcagggactacatcctgtctttaaaaagaaatgaaaagtaaatcttaccacaataaatataaaaaaatcttgtcagttacttttcttttacatattttgctgtgcaaaattgttttatatcttgagttactaactaaccacgcgtgttgttcctatgtgcttttctttcattttcaattctggttatatcaagaaaagataatctacaataataaacggcatttttttttgattctgtaaaaaaaaa

SEQ ID NO: 376 - protein, 373 aa, Homo sapiens
MASELAMSNSDLPTSPLAMEYVNDFDLMKFEVKKEPVETDRIISQCGRLIAGGSLSSTPMSTPCSSVPPSPSFSAPSPGSGSEQKAHLEDYYWMTGYPQQLNPEALGFSPEDAVEALISNSHQLQGGFDGYARGAQQLAAAAGAGAGASLGGSGEEMGPAAAVVSAVIAAAAAQSGAGPHYHHHHHHAAGHHHHPTAGAPGAAGSAAASAGGAGGAGGGGPASAGGGGGGGGGGGGGGAAGAGGALHPHHAAGGLHFDDRFSDEQLVTMSVRELNRQLRGVSKEEVIRLKQKRRTLKNRGYAQSCRFKRVQQRHVLESEKNQLLQQVDHLKQEISRLVRERDAYKEKYEKLVSSGFRENGSSSDNPSSPEFFM

SEQ ID NO: 377 - DNA, 2029 bp, Homo sapiens
gaattcgggcccgtcggctttcttcaaccctctcttcccggagcgcccccaatccacgagtggcagccgcgggactgtcgcgtcggcgcccgacgcggagtcagcaggggcgaaaagcggtagatcatggcaaccatagaagaaattgcacatcaaattattgaacaacagatgggagagattgttacagagcagcaaactgggcagaaaatccagattgtgacagcacttgatcataatacccaaggcaagcagttcattctgacaaatcacgacggctctactccaagcaaagtcattctggccaggcaagattccactccgggaaaagttttccttacaactccagatgcagcaggtgtcaaccagttattttttaccactcctgatctgtctgcacaacacctgcagctcctaacagataattctccagaccaaggaccaaataaggtttttgatctttgcgtagtatgtggagacaaagcatcaggacgtcattatggagcagtaacttgtgaaggctgcaaaggattttttaaaagaagcatccgaaaaaatttagtatattcatgtcgaggatcaaaggattgtattattaataagcaccaccgaaaccgctgtcaatactgcaggttacagagatgtattgcgtttggaatgaagcaagactctgtccaatgtgaaagaaaacccattgaagtatcacgagaaaaatcttccaactgtgccgcttcaacagaaaaaatctatatccgaaaggaccttcgtagcccattaactgcaactccaacttttgtaacagatagtgaaagtacaaggtcaacaggactgttagattcaggaatgttcatgaatattcatccatctggagtaaaaactgagtcagctgtgctgatgacatcagataaggctgaatcatgtcagggagatttaagtacattggccaatgtggttacatcattagcgaatcttggaaaaactaaagatctttctcaaaatagtaatgaaatgtctatgattgaaagcttaagcaatgatgatacctctttgtgtgaatttcaagaaatgcagaccaacggtgatgtttcaagggcatttgacactcttgcaaaagcattgaatcctggagagagcacagcctgccagagctcagtagcgggcatggaaggaagtgtacacctaatcactggagattcaagcataaattacaccgaaaaagaggggccacttctcagcgattcacatgtagctttcaggctcaccatgccttctcctatgcctgagtacctgaatgtgcactacattggggagtctgcctccagactgctgttcttatcaatgcactgggcactttcgattccttctttccaggctctagggcaagaaaacagcatatcactggtgaaagcttactggaatgaactttttactcttggtcttgcccagtgctggcaagtgatgaatgtagcaactatattagcaacatttgtcaattgtcttcacaatagtcttcaacaagatgccaaggtaattgcagccctcattcatttcacaagacgagcaatcactgatttataaatgcttaactatagaatggcttatgactacccaaaacagtgccccatcaacaaatggggaaaattgccttttgagctcaggaataatttataaattggggactaccttttagttctttagcatattctatttcttattgttttatataatttttaaatcatttgcttcctccttatgtttaacagcagaggggtaatcaccttaaaatgtcatcaaaaatagatctactagaaggcagcatcacattcccatcttacttatggactcctacccctggttcatgtcttatatgcctgtaatggttataaagcctaccttcaggaaagctatggttgactaattactaatggatgggttttaaacatgtccctctacaataaattaaaatctttcaatgtttgaatataatgtggaggtgtttacctgagggcctctctatctccccgaattc

SEQ ID NO: 378 - protein, 483 aa, Homo sapiens
MATIEEIAHQIIEQQMGEIVTEQQTGQKIQIVTALDHNTQGKQFILTNHDGSTPSKVILARQDSTPGKVFLTTPDAAGVNQLFFTTPDLSAQHLQLLTDNSPDQGPNKVFDLCVVCGDKASGRHYGAVTCEGCKGFFKRSIRKNLVYSCRGSKDCIINKHHRNRCQYCRLQRCIAFGMKQDSVQCERKPIEVSREKSSNCAASTEKIYIRKDLRSPLTATPTFVTDSESTRSTGLLDSGMFMNIHPSGVKTESAVLMTSDKAESCQGDLSTLANVVTSLANLGKTKDLSQNSNEMSMIESLSNDDTSLCEFQEMQTNGDVSRAFDTLAKALNPGESTACQSSVAGMEGSVHLITGDSSINYTEKEGPLLSDSHVAFRLTMPSPMPEYLNVHYIGESASRLLFLSMHWALSIPSFQALGQENSISLVKAYWNELFTLGLAQCWQVMNVATILATFVNCLHNSLQQDAKVIAALIHFTRRAITDL

SEQ ID NO: 379 - DNA, 2618 bp, Homo sapiens
atgaagcacctgaagcggtggtggtcggccggcggcggcctcctgcacctcaccctcctgctgagcttggcggggctccgcgtagacctagatctttacctgctgctgccgccgcccaccctgctgcaggacgagctgctgttcctgggcggcccggccagctccgcctacgcgctcagccccttctcggcctcgggagggtgggggcgcgcgggccacttgcaccccaagggccgggagctggaccctgccgcgccgcccgagggccagctgctccgggaggtgcgcgcgctcggggtccccttcgtccctcgcaccagcgtggatgcatggctggtgcacagcgtggctgccgggagcgcggacgaggcccacgggctgctcggcgccgccgccgcctcgtccaccggaggagccggcgccagcgtggacggcggcagccaggctgtgcaggggggcggcggggacccccgagcggctcggagtggccccttggacgccggggaagaggagaaggcacccgcggaaccgacggctcaggtgccggacgctggcggatgtgcgagcgaggagaatggggtactaagagaaaagcacgaagctgtggatcatagttcccagcatgaggaaaatgaagaaagggtgtcagcccagaaggagaactcacttcagcagaatgatgatgatgaaaacaaaatagcagagaaacctgactgggaggcagaaaagaccactgaatctagaaatgagagacatctgaatgggacagatacttctttctctctggaagacttattccagttgctttcatcacagcctgaaaattcactggagggcatctcattgggagatattcctcttccaggcagtatcagtgatggcatgaattcttcagcacattatcatgtaaacttcagccaggctataagtcaggatgtgaatcttcatgaggccatcttgctttgtcccaacaatacatttagaagagatccaacagcaaggacttcacagtcacaagaaccatttctgcagttaaattctcataccaccaatcctgagcaaacccttcctggaactaatttgacaggatttctttcaccggttgacaatcatatgaggaatctaacaagccaagacctactgtatgaccttgacataaatatatttgatgagataaacttaatgtcattggccacagaagacaactttgatccaatcgatgtttctcagctttttgatgaaccagattctgattctggcctttctttagattcaagtcacaataatacctctgtcatcaagtctaattcctctcactctgtgtgtgatgaaggtgctataggttattgcactgaccatgaatctagttcccatcatgacttagaaggtgctgtaggtggctactacccagaacccagtaagctttgtcacttggatcaaagtgattctgatttccatggagatcttacatttcaacacgtatttcataaccacacttaccacttacagccaactgcaccagaatctacttctgaaccttttccgtggcctgggaagtcacagaagataaggagtagataccttgaagacacagatagaaacttgagccgtgatgaacagcgtgctaaagctttgcatatccctttttctgtagatgaaattgtcggcatgcctgttgattctttcaatagcatgttaagtagatattatctgacagacctacaagtctcacttatccgtgacatcagacgaagagggaaaaataaagttgctgcgcagaactgtcgtaaacgcaaattggacataattttgaatttagaagatgatgtatgtaacttgcaagcaaagaaggaaactcttaagagagagcaagcacaatgtaacaaagctattaacataatgaaacagaaactgcatgacctttatcatgatatttttagtagattaagagatgaccaaggtaggccagtcaatcccaaccactatgctctccagtgtacccatgatggaagtatcttgatagtacccaaagaactggtggcctcaggccacaaaaaggaaacccaaaagggaaagagaaagtgagaagaaactgaagatggactctattatgtgaagtagtaatgttcagaaactgattatttggatcagaaaccattgaaactgcttcaagaattgtatctttaagtactgctacttgaataactcagttaacgctgttttgaagcttacatggacaaatgtttaggacttcaagatcacacttgtgggcaatctgggggagccacaacttttcatgaagtgcattgtatacaaaattcatagttatgtccaaagaataggttaacatgaaaacccagtaagactttccatcttggcagccatcctttttaagagtaagttggttacttcaaaaagagcaaacactggggatcaaattattttaagaggtatttcagttttaaatgcaaaatagccttattttcatttagtttgttagcactatagtgagcttttcaaacactattttaatctttatatttaacttataaattttgctttctatggaaataaattttgtatttgtattaaaaattaacttttcccttttatacaga

SEQ ID NO: 380 - protein, 694 aa, Homo sapiens
MKHLKRWWSAGGGLLHLTLLLSLAGLRVDLDLYLLLPPPTLLQDELLFLGGPASSAYALSPFSASGGWGRAGHLHPKGRELDPAAPPEGQLLREVRALGVPFVPRTSVDAWLVHSVAAGSADEAHGLLGAAAASSTGGAGASVDGGSQAVQGGGGDPRAARSGPLDAGEEEKAPAEPTAQVPDAGGCASEENGVLREKHEAVDHSSQHEENEERVSAQKENSLQQNDDDENKIAEKPDWEAEKTTESRNERHLNGTDTSFSLEDLFQLLSSQPENSLEGISLGDIPLPGSISDGMNSSAHYHVNFSQAISQDVNLHEAILLCPNNTFRRDPTARTSQSQEPFLQLNSHTTNPEQTLPGTNLTGFLSPVDNHMRNLTSQDLLYDLDINIFDEINLMSLATEDNFDPIDVSQLFDEPDSDSGLSLDSSHNNTSVIKSNSSHSVCDEGAIGYCTDHESSSHHDLEGAVGGYYPEPSKLCHLDQSDSDFHGDLTFQHVFHNHTYHLQPTAPESTSEPFPWPGKSQKIRSRYLEDTDRNLSRDEQRAKALHIPFSVDEIVGMPVDSFNSMLSRYYLTDLQVSLIRDIRRRGKNKVAAQNCRKRKLDIILNLEDDVCNLQAKKETLKREQAQCNKAINIMKQKLHDLYHDIFSRLRDDQGRPVNPNHYALQCTHDGSILIVPKELVASGHKKETQKGKRK

SEQ ID NO: 381 - DNA, 1244 bp, Homo sapiens
tgcaagggtcctgtgggctggctgcactggcctctgcggtggtgcctgccagaatgccccacttggaaaacgtggtgctttgtcgcgagtctcaagtgtccatcttgcagtccttgtttggagagagacatcatttcagctttccatccatttttatttatagacatactgctagtggaaagacctatgtaacacaaacgttgttgaaaactttagagctcccacatgtgtttgtgaattgtgttgaatgctttacattgaggctgcttttggaacaaattttaaacaaattgaatcatcttagttcttcagaggatggatgttctactgaaataacctgtgaaacatttaatgactttgttcgcttgtttaaacaagtaaccacagctgaaaatcttaaagatcagactgtatatattgttctagataaagcagagtatctaagagatatggaagcaaatcttttgcctggatttcttagattacaagaattggctgacagaaatgtgactgttctctttctcagtgaaattgtttgggaaaagtttcgtccaaatactggatgctttgagccgtttgtcttatatttccctgattacagcataggcaaccttcaaaagatcctgtcccatgatcatcctccagagtattcagctgatttctatgctgcctacattaacattcttcttggagttttctacactgtttgtcgagatttgaaagagctcagacatctggcagtacttaattttcctaaatattgtgaacccgtggttaaaggagaagcaagtgaacgtgatactcgcaaactgtggagaaatattgaacctcatttgaagaaagctatgcagactgtttatctcagggaaatatcaagttcccagtgggaaaagctacagaaagatgacacagatccggggcaactgaaaggtatcagaggaagtattgagacagttaccggagatacttcttcagctaattatcaagatactaaagttaatactaaagagcattcagtcaggaaatagtgttataaaagagaatttacttttcaagctataatgctattttgattaatgatttttctttaactgaagctctaatttaatgggaggaaataaaagtttgaataccagctttctattttctaaatattggattatatcatgaaaatcaagcagtttctatttctttaaatgcttttattaaagcaatctaattatgtgaaaaaaaaaaaaaaaaaa

SEQ ID NO: 382 - protein, 324 aa, Homo sapiens [sequence omitted]

SEQ ID NO: 383 - DNA, 2881 bp, Homo sapiens
ggcacgaggcttcagcttctcttcacgcactccaagatctaaaccgagaatcgaaactaagctggggtccatggagcctgcacccgcccgatctccgaggccccagcaggaccccgcccggccccaggagcccaccatgcctccccccgagaccccctctgaaggccgccagcccagccccagccccagccctacagagcgagcccccgcttcggaggaggagttccagtttctgcgctgccagcaatgccaggcggaagccaagtgcccgaagctgctgccttgtctgcacacgctgtgctcaggatgcctggaggcgtcgggcatgcagtgccccatctgccaggcgccctggcccctaggtgcagacacacccgccctggataacgtctttttcgagagtctgcagcggcgcctgtcggtgtaccggcagattgtggatgcgcaggctgtgtgcacccgctgcaaagagtcggccgacttctggtgctttgagtgcgagcagctcctctgcgccaagtgcttcgaggcacaccagtggttcctcaagcacgaggcccggcccctagcagagctgcgcaaccagtcggtgcgtgagttcctggacggcacccgcaagaccaacaacatcttctgctccaaccccaaccaccgcacccctacgctgaccagcatctactgccgaggatgttccaagccgctgtgctgctcgtgcgcgctccttgacagcagccacagtgatctcaagtgcgacatcagcgcagagatccagcagcgacaggaggagctggacgccatgacgcaggcgctgcaggagcaggatagtgcctttggcgcggttcacgcgcagatgcacgcggctgtcggccagctgggccgcgcgcgtgccgagaccgaggagctgatccgcgagcgcgtgcgccaggtggtagctcacgtgcgggctcaggagcgcgagctgctggaggctgtggacgcgcggtaccagcgcgactacgaggagatggccagtcggctgggccgcctggatgctgtgctgcagcgcatccgcacgggcagcgcgctggtgcagaggatgaagtgctacgcctcggaccaggaggtgctggacatgcacggtttcctgcgccaggcgctctgccgcctgcgccaggaggagccccagagcctgcaagctgccgtgcgcaccgatggcttcgacgagttcaaggtgcgcctgcaggacctcagctcttgcatcacccaggggaaagatgcagctgtatccaagaaagccagcccagaggctgccagcactcccagggaccctattgacgttgacctggatgtctccaatacaacgacagcccagaagaggaagtgcagccagacccagtgccccaggaaggtcatcaagatggagtctgaggaggggaaggaggcaaggttggctcggagctccccggagcagcccaggcccagcacctccaaggcagtctcaccaccccacctggatggaccgcctagccccaggagccccgtcataggaagtgaggtcttcctgcccaacagcaaccacgtggccagtggcgccggggaggcagaggaacgcgttgtggtgatcagcagctcggaagactcagatgccgaaaactcgtgcatggagcccatggagaccgccgagccacagtcctcgccagcccactcctcgccagcccactcctcgccagcccactcctcgccagtccagtctctgctgagagcacaaggagcctccagcctgccctgtggcacataccaccccccagcttggcctccccaccagcccgctgagcaggctgccacccccgatgctgagcctcacagcgagcctcctgatcaccaggagcgccctgccgtccaccgtgggatccgctacctgttgtacagagcacagagagccatccgccttcgccatgccctccgcttgcaccctcaattgcatcgggcccctattcggacttggtctccccatgtggtccaagccagcactcctgccatcacagggcccctcaaccatcctgccaatgcccaggaacatcctgcccagctgcaaaggggcatcagcccaccccaccggatacgaggggctgtgcgatcccgcagccgctccctccggggctcctcccatttatcccagtggctcaacaacttttttgccctccccttctcctccatggcttcccagcttgacatgtcttccgtggtgggggcaggggaaggcagagcccagactcttggagcagttgttccccctggggactctgtcagaggctccatggaggcctctcaagtccaagtgcctctggaagcctctccaattacattcccaccaccctgtgccccagaaaggccccccatcagcccagtcccaggcgcccgtcaagcaggcctctgagagtgctacccttctcttgtaaccttgcagccaacacccctgcccggcccctgagctgcctcctccagcccatgctcttacaggccctgcacagagtagcactcattaattcttggttaaggaatgaatcaacgaatgaatggctatgcatggacctctgggcagggagacctgggtcttctctggctgagaggggaaggctaaggcatggctgagattcaagccaccattccaggcctctttgcccaagaaagaaacttctgtcacccttgcactctcctgtgttctgagtccctggccaatagcacagccttccatgccccgacccccaccccaagcctctccactaggcctctgccaggatctaagcccatgagcacagggactggctatcccaagacctggcagatgtggctgctcaataaacacttgttgaaccatcaaaaaaaaaaaaaaaaaaaaaaa

SEQ ID NO: 384 - protein, 759 aa, Homo sapiens
MPPPETPSEGRQPSPSPSPTERAPASEEEFQFLRCQQCQAEAKCPKLLPCLHTLCSGCLEASGMQCPICQAPWPLGADTPALDNVFFESLQRRLSVYRQIVDAQAVCTRCKESADFWCFECEQLLCAKCFEAHQWFLKHEARPLAELRNQSVREFLDGTRKTNNIFCSNPNHRTPTLTSIYCRGCSKPLCCSCALLDSSHSDLKCDISAEIQQRQEELDAMTQALQEQDSAFGAVHAQMHAAVGQLGRARAETEELIRERVRQVVAHVRAQERELLEAVDARYQRDYEEMASRLGRLDAVLQRIRTGSALVQRMKCYASDQEVLDMHGFLRQALCRLRQEEPQSLQAAVRTDGFDEFKVRLQDLSSCITQGKDAAVSKKASPEAASTPRDPIDVDLDVSNTTTAQKRKCSQTQCPRKVIKMESEEGKEARLARSSPEQPRPSTSKAVSPPHLDGPPSPRSPVIGSEVFLPNSNHVASGAGEAEERVVVISSSEDSDAENSCMEPMETAEPQSSPAHSSPAHSSPAHSSPVQSLLRAQGASSLPCGTYHPPAWPPHQPAEQAATPDAEPHSEPPDHQERPAVHRGIRYLLYRAQRAIRLRHALRLHPQLHRAPIRTWSPHVVQASTPAITGPLNHPANAQEHPAQLQRGISPPHRIRGAVRSRSRSLRGSSHLSQWLNNFFALPFSSMASQLDMSSVVGAGEGRAQTLGAVVPPGDSVRGSMEASQVQVPLEASPITFPPPCAPERPPISPVPGARQAGL

SEQ ID NO: 385 - DNA, 983 bp, Homo sapiens
gtggaattcatggcatctacttcgtatgactattgcagagtgcccatggaagacggggataagcgctgtaagcttctgctggggataggaattctggtgctcctgatcatcgtgattctgggggtgcccttgattatcttcaccatcaaggccaacagcgaggcctgccgggacggccttcgggcagtgatggagtgtcgcaatgtcacccatctcctgcaacaagagctgaccgaggcccagaagggctttcaggatgtggaggcccaggccgccacctgcaaccacactgtgatggccctaatggcttccctggatgcagagaaggcccaaggacaaaagaaagtggaggagcttgagggagagatcactacattaaaccataagcttcaggacgcgtctgcagaggtggagcgactgagaagagaaaaccaggtcttaagcgtgagaatcgcggacaagaagtactaccccagctcccaggactccagctccgctgcggcgccccagctgctgattgtgctgctgggcctcagcgctctgctgcagtgagatcccaggaagctggcacatcttggaaggtccgtcctgctcggcttttcgcttgaacattcccttgatctcatcagttctgagcgggtcatggggcaacacggttagcggggagagcacggggtagccggagaagggcctctggagcaggtctggaggggccatggggcagtcctgggtgtggggacacagtcgggttgacccagggctgtctccctccagagcctccctccggacaatgagtcccccctcttgtctcccaccctgagattgggcatggggtgcggtgtggggggcatgtgctgcctgttgttatgggttttttttgcggggggggttgcttttttctggggtctttgagctccaaaaaataaacacttcctttgagggagagcaaaaaaaaaaaaaaaaaaaaaaaaaaaaaaaaaaaa

SEQ ID NO: 386 - protein, 180 aa, Homo sapiens
MASTSYDYCRVPMEDGDKRCKLLLGIGILVLLIIVILGVPLIIFTIKANSEACRDGLRAVMECRNVTHLLQQELTEAQKGFQDVEAQAATCNHTVMALMASLDAEKAQGQKKVEELEGEITTLNHKLQDASAEVERLRRENQVLSVRIADKKYYPSSQDSSSAAAPQLLIVLLGLSALLQ

SEQ ID NO: 387 - DNA, 3200 bp, Homo sapiens
caggaagggccatgaagattaataaagatttggactcagggcaaatatttacttagtagcaataactcaaagaattactgttgaataaataagccaattaagcagccaatcacgtactatgcggatgcacacaaatgaaaccctcacttcaacctgaagacattcgcacatgagttacgtagagggacctgcaggaagcggtagagaaaacataaggcttatgcgtttaatttccacaccaatttcaggatctttgtcactgacagcagcactaagacttgttaactttatatagttaagaagaacaaggctgagcgcgatgactcacgcctgtaagcctagaactttgggaggccaaagcaggcagactgcttgagcccaggagttccagaccagcctgggcaacatggcaacaccccatctctacaaaaaaatacaagaatcagctgggcgtggtgatgtgttcctgtaatctcagctactcgggaggcagaggcaggaggattgcttgaacccgggaggcagaggttgtagttagccgagatctcgccactgcactccagtctggacgacagagtgagactcagtctcaaataaataaataaatacataaatataaggaaaaaaataaagctgctttctcctcttcctcctctttggtctcatctggctctgctccaggcatctgccacaatgtgggtgcttacacctgctgcttttgctgggaagttcttgagtgtgttcaggcaacctctgagctctctgtggaggagcctggtcccgctgttctgctggctgagggcaaccttctggctgctagctaccaagaggagaaagcagcagctggtcctgagagggccagatgagaccaaagaggaggaagaggaccctcctctgcccaccaccccaaccagcgtcaactatcacttcactcgccagtgcaactacaaatgcggcttctgtttccacacagccaaaacatcctttgtgctgccccttgaggaagcaaagagaggattgcttttgcttaaggaagctggtatggagaagatcaacttttcaggtggagagccatttcttcaagaccggggagaatacctgggcaagttggtgaggttctgcaaagtagagttgcggctgcccagcgtgagcatcgtgagcaatggaagcctgatccgggagaggtggttccagaattatggtgagtatttggacattctcgctatctcctgtgacagctttgacgaggaagtcaatgtccttattggccgtggccaaggaaagaagaaccatgtggaaaaccttcaaaagctgaggaggtggtgtagggattatagaatccctttcaagataaattctgtcattaatcgtttcaacgtggaagaggacatgacggaacagatcaaagcactaaaccctgtccgctggaaagtgttccagtgcctcttaattgaaggtgagaattgtggagaagatgctctaagagaagcagaaagatttgttattggtgatgaagaatttgaaagattcttggagcgccacaaagaagtgtcctgcttggtgcctgaatctaaccagaagatgaaagactcctaccttattctggatgaatatatgcgctttctgaactgtagaaagggacggaaggacccttccaagtccatcctggatgttggtgtagaagaagctataaaattcagtggatttgatgaaaagatgtttctgaagcgaggaggaaaatacatatggagtaaggctgatctgaagctggattggtagagcggaaagtggaacgagacttcaacacaccagtgggaaaactcctagagtaactgccattgtctgcaatactatcccgttggtatttcccagtggctgaaaacctgattttctgctgcacgtggcatctgattacctgtggtcactgaacacacgaataacttggatagcaaatcctgagacaatggaaaaccattaactttacttcattggcttataaccttgttgttattgaaacagcacttctgtttttgagtttgttttagctaaaaagaaggaatacacacaggaataatgaccccaaaaatgcttagataaggcccctatacacaggacctgacatttagctcaatgatgcgtttgtaagaaataagctctagtgatatctgtgggggcaatatttaatttggatttgattttttaaaacaatgtttactgcgatttctatatttccattttgaaactatttcttgttccaggtttgttcatttgacagagtcagtattttttgccaaatatccagataaccagttttcacatctgagacattacaaagtatctgcctcaattatttctgctggttataatgcttttttttttttttgcttttatgccattgcagtcttgtactttttactgtgatgtacagaaatagtcaacagatgtttccaagaacatatgatatgataatcctaccaattttcaagaagtctctagaaagagataacacatggaaagacggcgtggtgcagcccagcccacggtgcctgttccatgaatgctggctacctatgtgtgtggtacctgttgtgtccctttctcttcaaagatccctgagcaaaacaaagatacgctttccatttgatgatggagttgacatggaggcagtgcttgcattgctttgttcgcctatcatctggccacatgaggctgtcaagcaaaagaataggagtgtagttgagtagctggttggccctacatttctgagaagtgacgttacactgggttggcataagatatcctaaaatcacgctggaaccttgggcaaggaagaatgtgagcaagagtagagagagtgcctggatttcatgtcagtgaagccatgtcaccatatcatatttttgaatgaactctgagtcagttgaaatagggtaccatctaggtcagtttaagaagagtcagctcagagaaagcaagcataagggaaaatgtcacgtaaactagatcagggaacaaaatcctctccttgtggaaatatcccatgcagtttgttgatacaacttagtatcttattgcctaaaaaaaaatttcttatcattgtttcaaaaaagcaaaatcatggaaaatttttgttgtccaggcaaataaaaggtcattttaatttaaaaaaaaaaaaaaaaaaaaaaaaaaaaaaaaggcca

SEQ ID NO: 388 - protein, 361 aa, Homo sapiens
MWVLTPAAFAGKLLSVFRQPLSSLWRSLVPLFCWLRATFWLLATKRRKQQLVLRGPDETKEEEEDPPLPTTPTSVNYHFTRQCNYKCGFCFHTAKTSFVLPLEEAKRGLLLLKEAGMEKINFSGGEPFLQDRGEYLGKLVRFCKVELRLPSVSIVSNGSLIRERWFQNYGEYLDILAISCDSFDEEVNVLIGRGQGKKNHVENLQKLRRWCRDYRVAFKINSVINRFNVEEDMTEQIKALNPVRWKVFQCLLIEGENCGEDALREAERFVIGDEEFERFLERHKEVSCLVPESNQKMKDSYLILDEYMRFLNCRKGRKDPSKSILDVGVEEAIKFSGFDEKMFLKRGGKYIWSKADLKLDW

SEQ ID NO: 389 - DNA, 1702 bp, Homo sapiens
ctggctctccgctgcgctgcgctgcgctccggccgctcccgcggcccgtggatgggggtgtccggctgagccccgggatccgcctccctccgccaggacccgcacagataaactcatcctgaaagtcgctgttgttctcctgctgagcaagaatggaggccccactggtgagtctggatgaagagtttgaggaccttcgaccctcctgctcggaggacccggaggagaagccccagtgtttctatggttcatctccccaccatctcgaggacccctccctctccgagcttgagaatttttcttccgaaataatcagcttcaagtccatggaggacctcgtaaatgaatttgatgagaagctcaatgtctgctttcggaactacaacgccaagaccgagaacctagctcccgtgaagaaccagttacagatccaagaggaggaggagacccttcaggacgaggaggtttgggatgctctgacagacaattacatcccttcactctcagaagactggagggatccaaacatcgaggctctgaatggcaactgctctgacactgagatccatgagaaagaagaggaagagttcaatgagaagagtgaaaatgattccggtatcaacgaggagcctctgctcacagcagatcaggtaattgaggagattgaggaaatgatgcagaactccccagaccctgaggaagaagaggaggttctggaagaagaggatggaggagaaacttcctcccaggcagactcggtcctcctgcaggagatgcaggcattgacacagaccttcaacaacaactggtcctatgaagggctgaggcacatgtctgggtctgagctgaccgagctgctggaccaggtggagggtgccatccgtgacttctcggaggagctggtgcagcagctggcccgccgggacgagctggagtttgagaaggaagtgaagaactcctttatcacggtgcttattgaggttcagaacaagcagaaggagcagcgagaactgatgaaaaagaggcggaaagagaaagggctgagcctgcagagcagccggatagagaagggaaaccagatgcctctcaagcgcttcagcatggaaggcatctccaacattctgcagagtggcatccgccagacctttggctcctcaggaactgacaaacagtatctgaacacagtcattccttacgagaagaaagcctctcctccctcagtggaagacctgcagatgctgacaaacattctctttgccatgaaggaggataatgagaaggtgcctactttgctaacggactacattttaaaagtgctctgccctacctaaccttgccctttggagcagcctcgctgcaggaggtcactgagcaagagtcattccatcacagggactgcatgagaccatgtaacctccgacatgtatttaaacgtgtatagcttaacctggattaaacacgagcaagcgcgcggggtcctttgccgttggcttctagtgctagtaatcattggatgcatgatggggcagggccggtgatggtgcctcccccttgctggtgtcaggagaggggaaggcagccgctttcaccgctcattatgtagtctggctacagccctcaaaaacagcttatactcttaagactaattttgaaataaaaccttcatttaattaaaaaaaaaaaaaaaaaaaaaaaaaaaaaa

SEQ ID NO: 390 - protein, 392 aa, Homo sapiens
MEAPLVSLDEEFEDLRPSCSEDPEEKPQCFYGSSPHHLEDPSLSELENFSSEIISFKSMEDLVNEFDEKLNVCFRNYNAKTENLAPVKNQLQIQEEEETLQDEEVWDALTDNYIPSLSEDWRDPNIEALNGNCSDTEIHEKEEEEFNEKSENDSGINEEPLLTADQVIEEIEEMMQNSPDPEEEEEVLEEEDGGETSSQADSVLLQEMQALTQTFNNNWSYEGLRHMSGSELTELLDQVEGAIRDFSEELVQQLARRDELEFEKEVKNSFITVLIEVQNKQKEQRELMKKRRKEKGLSLQSSRIEKGNQMPLKRFSMEGISNILQSGIRQTFGSSGTDKQYLNTVIPYEKKASPPSVEDLQMLTNILFAMKEDNEKVPTLLTDYILKVLCPT

SEQ ID NO: 391 - DNA, 1318 bp, Homo sapiens
ctcctctaggccgccggccgcgaagcgctgagtcacggtgaggcgactggacccacactctcttaacctgccctccctgcactcgctcccggcggctcttcgcgtcacccccgccgctaaggctccaggtgccgctaccgcagcgtgagtacctggggctcctgcaggggtccactagccctccatcctctacagctcagcatcagaacactctctttttagactccgatatggggtcctccaagaaagttactctctcagtgctcagccgggagcagtcggaaggggttggagcgagggtccggagaagcattggcagacccgagttaaaaaatctggatccgtttttactgtttgatgaatttaaaggaggtagaccaggaggatttcctgatcatccacatcgaggttttgaaacagtatcctacctcctggaagggggcagcatggcccatgaagacttctgtggacacactggtaaaatgaacccaggagatttgcagtggatgactgcgggccggggcattctgcacgctgagatgccttgctcagaggagccagcccatggcctacaactgtgggttaatttgaggagctcagagaagatggtggagcctcagtaccaggaactgaaaagtgaagaaatccctaaacccagtaaggatggtgtgacagttgctgtcatttctggagaagccctgggaataaagtccaaggtttacactcgcacaccaaccttatatttggacttcaaattggacccaggagccaaacattcccaacctatccctaaagggtggacaagcttcatttacacgatatctggagatgtgtatattgggcccgatgatgcacaacaaaaaatagaacctcatcacacagcagtgcttggagaaggtgacagtgtccaggtggagaacaaggatcccaagagaagccactttgtcttaattgctggggagccattaagagaaccagttatccaacatggtccatttgtgatgaacaccaatgaagagatttctcaagctattcttgatttcagaaacgcaaaaaatgggtttgaaagggccaaaacctggaaatcaaagattgggaactagtggaaagcggaagagcaggtcttgatgtgtcctagaattttgccatttctgagattgagccattgaaggcattccatttctaaagcttatttagccggtgcttctaaagaattccacactaacgtgataacatggtttttgtaacaataaatgtaggatatttcctggcacatgcaaataaacctaatcattgtttctttaaaaaaaaaaaaaaa

SEQ ID NO: 392 - protein, 290 aa, Homo sapiens
MGSSKKVTLSVLSREQSEGVGARVRRSIGRPELKNLDPFLLFDEFKGGRPGGFPDHPHRGFETVSYLLEGGSMAHEDFCGHTGKMNPGDLQWMTAGRGILHAEMPCSEEPAHGLQLWVNLRSSEKMVEPQYQELKSEEIPKPSKDGVTVAVISGEALGIKSKVYTRTPTLYLDFKLDPGAKHSQPIPKGWTSFIYTISGDVYIGPDDAQQKIEPHHTAVLGEGDSVQVENKDPKRSHFVLIAGEPLREPVIQHGPFVMNTNEEISQAILDFRNAKNGFERAKTWKSKIGN

SEQ ID NO: 393 - DNA, 879 bp, Homo sapiens
gcggagtctccaactgggagagctgcagctgccgagaggaggagaacgctgaggtcggtcggaccaacggacgcgctgaccgctgccaactgcagctcgcgctgcctcctgctcgcgccgtgccactaaggtcactcccgcctccgagagcccagagccgagatggaaacggtccaggagctgatccccctggccaaggagatgatggcccagaagcgcaaggggaagatggtgaagctgtacgtgctgggcagcgtgctggccctcttcggcgtggtgctcggcctgatggagactgtgtgcagccccttcacggccgccagacgtctgcgggaccaggaggcagccgtggcggagctgcaggccgccctggagcgacaggctctccagaagcaagccctgcaggagaaaggcaagcagcaggacacggtcctcggcggccgggccctgtccaaccggcagcacgcctcctaggaactgtgggagaccagcggagtgggagggagacgcagtagacagagacagaccgagaaggaagggagagacagagggggcgcgcgcacaggagcctgactccgctgggagagtgcaggagcacgtgctgttttttatttggacttaacttcagagaaaccgctgacatctagaactgacctaccacaagcatccaccaaaggagtttgggattgagttttgctgctgtgcagcactgcattgtcatgacatttccaacactgtgtgaattatctaaatgcgtctaccattttgcactagggaggaaggataaatgctttttatgttattattattaattattacaatgaccaccattttgcattttgaaataaaaaactttttataccaaaaaaaaaaaaaaaa

SEQ ID NO: 394 - protein, 103 aa, Homo sapiens
METVQELIPLAKEMMAQKRKGKMVKLYVLGSVLALFGVVLGLMETVCSPFTAARRLRDQEAAVAELQAALERQALQKQALQEKGKQQDTVLGGRALSNRQHAS

SEQ ID NO: 395 - DNA, 1932 bp, Homo sapiens
atgcaggccccacgggagctcgcggtgggcatcgacctgggcaccacctactcgtgcgtgggcgtgtttcagcagggccgcgtggagatcctggccaacgaccagggcaaccgcaccacgcccagctacgtggccttcaccgacaccgagcggctggtcggggacgcggccaagagccaggcggccctgaacccccacaacaccgtgttcgatgccaagcggctgatcgggcgcaagttcgcggacaccacggtgcagtcggacatgaagcactggcccttccgggtggtgagcgagggcggcaagcccaaggtgccggtatcgtaccgcggggaggacaagacgttctaccccgaggagatctcgtccatggtgctgagcaagatgaaggagacggccgaggcgtacctgggccagcccgtgaagcacgcagtgatcaccgtgcccgcctatttcaatgactcgcagcgccaggccaccaaggacgcgggggccatcgcggggctcaacgtgttgcggatcatcaatgagcccacggcagctgccatcgcctatgggctggaccggcggggcgcgggagagcgcaacgtgctcatttttgacctgggtgggggcaccttcgatgtgtcggttctctccattgacgctggtgtctttgaggtgaaagccactgctggagatacccacctgggaggagaggacttcgacaaccggctcgtgaaccacttcatggaagaattccggcggaagcatgggaaggacctgagcgggaacaagcgtgccctcggcaggctgcgcacagcctgtgagcgcgccaagcgcaccctgtcctccagcacccaggccaccctggagatagactccctgttcgagggcgtggacttctacacgtccatcactcgtgcccgctttgaggaactgtgctcagacctcttccgcagcaccctggagccggtggagaaggccctgcgggatgccaagctggacaaggcccagattcatgacgtcgtcctggtggggggctccactcgcatccccaaggtgcagaagttgctgcaggacttcttcaacggcaaggagctgaacaagagcatcaaccctgatgaggctgtggcctatggggctgctgtgcaggcggccgtgttgatgggggacaaatgtgagaaagtgcaggatctcctgctgctggatgtggctcccctgtctctggggctggagacagcaggtggggtgatgaccacgctgatccagaggaacgccactatccccaccaagcagacccagactttcaccacctactcggacaaccagcctggggtcttcatccaggtgtatgagggtgagagggccatgaccaaggacaacaacctgctggggcgttttgaactcagtggcatccctcctgccccacgtggagtcccccagatagaggtgacctttgacattgatgctaatggcatcctgagcgtgacagccactgacaggagcacaggtaaggctaacaagatcaccatcaccaatgacaagggccggctgagcaaggaggaggtggagaggatggttcatgaagccgagcagtacaaggctgaggatgaggcccagagggacagagtggctgccaaaaactcgctggaggcccatgtcttccatgtgaaaggttctttgcaagaggaaagccttagggacaagattcccgaagaggacaggcgcaaaatgcaagacaagtgtcgggaagtccttgcctggctggagcacaaccagctggcagagaaggaggagtatgagcatcagaagagggagctggagcaaatctgtcgccccatcttctccaggctctatggggggcctggtgtccctgggggcagcagttgtggcactcaagcccgccagggggaccccagcaccggccccatcattgaggaggttgattga

SEQ ID NO: 396 - protein, 643 aa, Homo sapiens
MQAPRELAVGIDLGTTYSCVGVFQQGRVEILANDQGNRTTPSYVAFTDTERLVGDAAKSQAALNPHNTVFDAKRLIGRKFADTTVQSDMKHWPFRVVSEGGKPKVPVSYRGEDKTFYPEEISSMVLSKMKETAEAYLGQPVKHAVITVPAYFNDSQRQATKDAGAIAGLNVLRIINEPTAAAIAYGLDRRGAGERNVLIFDLGGGTFDVSVLSIDAGVFEVKATAGDTHLGGEDFDNRLVNHFMEEFRRKHGKDLSGNKRALGRLRTACERAKRTLSSSTQATLEIDSLFEGVDFYTSITRARFEELCSDLFRSTLEPVEKALRDAKLDKAQIHDVVLVGGSTRIPKVQKLLQDFFNGKELNKSINPDEAVAYGAAVQAAVLMGDKCEKVQDLLLLDVAPLSLGLETAGGVMTTLIQRNATIPTKQTQTFTTYSDNQPGVFIQVYEGERAMTKDNNLLGRFELSGIPPAPRGVPQIEVTFDIDANGILSVTATDRSTGKANKITITNDKGRLSKEEVERMVHEAEQYKAEDEAQRDRVAAKNSLEAHVFHVKGSLQEESLRDKIPEEDRRKMQDKCREVLAWLEHNQLAEKEEYEHQKRELEQICRPIFSRLYGGPGVPGGSSCGTQARQGDPSTGPIIEEVD

SEQ ID NO: 397 - DNA, 3387 bp, Homo sapiens
aaagggctaaagctattggcattggcagctgtctccaggcgtcgtccgcggagcctgaccctgcgccaggacggaggaggctgtgcccatgtaactgtcctgaagtactgcggtggccccctcccccgcggctgggagggcaggcaggacgaggttggctttcctcgcacggtctctgggcgtgggcccccgccgcagctccgcggagcctcggtgtctcctgcaacagggggcggggggaacagcggcgagcagccctgggctgcggcttcctccccacgcccgagtctcctgcgcaccgccgccgaggacgcgcgcccgagcctagtccccacgccgcggcgcgcccgggctccctgctgatcccagaacaatcaaccatgacgaccgaatctggatcagactcggaatccaagccggaccaggaggccgagccccaggaggcggcgggggcgcaggggcgcgcgggggcgcccgtgccggagccgcccaaggaggagcagcagcaggccctggagcagttcgccgccgctgcagcgcacagcaccccggtgcggagggaggtcactgacaaggaacaggagtttgctgccagggctgcaaaacagctcgaatatcagcaattagaagacgataaactttctcagaaatcatctagcagtaaactctctcggtctccattaaagattgtcaaaaagcctaaaagcatgcagtgcaaagtgatacttctcgatggatcagaatatacctgtgatgtagagaaacgctccagaggacaagtgctgtttgataaagtgtgtgaacacttgaacttgctagagaaagactactttgggcttacgtatcgagatgctgaaaaccagaagaattggttggaccctgctaaggaaataaaaaaacaggttcgaagtggtgcttggcacttttcatttaatgtgaaattttatccaccagaccctgcccaactatctgaagatatcaccaggtactacctctgcttgcagttgcgagatgacatcgtgtccggaaggctgccctgctcctttgttaccctggccttgctgggctcctacactgtccagtcagagctcggagactatgacccagatgaatgtgggagcgattacattagtgagttccgctttgcaccaaaccacactaaagaactggaagacaaagtgatcgagctgcacaagagccacagaggaatgacgccagcagaagcagagatgcatttcttggaaaatgccaaaaaattatcaatgtatggggtagatttacatcatgctaaggactcagaaggggtagaaattatgttaggagtttgtgcaagtggtctgttgatatatcgcgaccggctgcgaataaacagatttgcctggcccaaggttctaaagatttcatacaaacggaacaacttttacattaagatccggccgggagagtttgaacaatttgaaagcaccattgggtttaagctgccaaaccatcgagctgccaagcgtttatggaaagtatgtgttgagcatcatacatttttcagactactgttaccagaagcacctcccaagaaattcctaaccttgggttccaagtttcgttatagtggcaggacacaagcgcaaacgagaagagccagtgcgttgatagatcgcccagcaccttactttgaacgctcatccagcaaacgttataccatgtctcgcagcttggatggagcatcagtgaatgaaaaccatgaaatatacatgaaggattctatgtctgctgcagaggttggtactggccagtacgccacaacaaaaggcatctctcagaccaacttgatcaccactgtgactccggagaagaaggctgaggaggagcgggacgaggaagaggacaaacggaggaagggggaagaagtcacgcccatctcggccatccggcacgagggaaagactgacagtgagcgcacggacaccgcagccgacggggagaccaccgccactgaggagctagaaaaaactcaagatgacctgatgaaacatcaaaccaacattagcgagctgaaaagaaccttcttagaaacctcaacagacactgccgtaacgaatgaatgggagaagaggctttccacctcccccgtgcgactggccgccaggcaggaggatgcccccatgatcgaaccacttgtccctgaagagaaaatggaaaccaagacggagtccagtggaatagagacggaacccaccgtgcaccacctgccgcttagcactgagaaggtggtgcaggagaccgtgttggtggaggagcggcgtgtggtgcacgcgagtggggatgcttcttactcggcgggagacagcggggatgctgcagcacagcccgcattcacaggcattaaagggaaagagggctctgccttgacggagggggctaaagaggaaggaggggaggaggtcgctaaagctgtcctggaacaggaagagacagccgctgcttcccgtgagcgacaagaggagcagagtgcagccatccacatttcagaaactttggaacaaaaacctcattttgagtcctcaacggtgaagacggaaaccatcagttttggcagtgtttcaccgggaggagtaaagctagaaatttccacgaaggaagtgccagtagttcacaccgaaaccaaaaccatcacatatgaatcatcacaggtcgatccaggcacagatctggagccaggcgtgctgatgagtgcacagacgatcacatctgaaaccaccagtaccaccaccactacgcacatcaccaaaactgtgaaagggggcatttcagagacaagaattgagaagcgaatagtcatcacgggggatgcagacattgaccatgaccaggcgctggctcaggcaattaaagaggccaaagagcagcaccctgacatgtcagtgaccaaagtagtggtccataaagagacagagatcacaccagaagatggagaggattgaccagaggaataacttagcttgcacatgaatgcagtcatgcaaaccgttaggaaaaccagagcctatatggagttccctcttctaacccaactgacttgtatctgtccgtggaaaatttcagtccagaagaattgaccttgaccattaataaagacactggcagagagatcttcccataataaagcaatctgattcagcatcactaaaccgataatgcatgaagcaacgataaaattacaaaagagcagcatttttaattttcacaaaatgtctcagttttcagctatacctgcacgttcataaccaacaatataaaccgtggtctcatgtaacacataaacaattcatgcctttcatagtttattattattaaagtctaaacaaaattgcaaaaaaaaaaaaaaaaaaa

SEQ ID NO: 398 - protein, 865 aa, Homo sapiens
MTTESGSDSESKPDQEAEPQEAAGAQGRAGAPVPEPPKEEQQQALEQFAAAAAHSTPVRREVTDKEQEFAARAAKQLEYQQLEDDKLSQKSSSSKLSRSPLKIVKKPKSMQCKVILLDGSEYTCDVEKRSRGQVLFDKVCEHLNLLEKDYFGLTYRDAENQKNWLDPAKEIKKQVRSGAWHFSFNVKFYPPDPAQLSEDITRYYLCLQLRDDIVSGRLPCSFVTLALLGSYTVQSELGDYDPDECGSDYISEFRFAPNHTKELEDKVIELHKSHRGMTPAEAEMHFLENAKKLSMYGVDLHHAKDSEGVEIMLGVCASGLLIYRDRLRINRFAWPKVLKISYKRNNFYIKIRPGEFEQFESTIGFKLPNHRAAKRLWKVCVEHHTFFRLLLPEAPPKKFLTLGSKFRYSGRTQAQTRRASALIDRPAPYFERSSSKRYTMSRSLDGASVNENHEIYMKDSMSAAEVGTGQYATTKGISQTNLITTVTPEKKAEEERDEEEDKRRKGEEVTPISAIRHEGKTDSERTDTAADGETTATEELEKTQDDLMKHQTNISELKRTFLETSTDTAVTNEWEKRLSTSPVRLAARQEDAPMIEPLVPEEKMETKTESSGIETEPTVHHLPLSTEKVVQETVLVEERRVVHASGDASYSAGDSGDAAAQPAFTGIKGKEGSALTEGAKEEGGEEVAKAVLEQEETAAASRERQEEQSAAIHISETLEQKPHFESSTVKTETISFGSVSPGGVKLEISTKEVPVVHTETKTITYESSQVDPGTDLEPGVLMSAQTITSETTSTTTTTHITKTVKGGISETRIEKRIVITGDADIDHDQALAQAIKEAKEQHPDMSVTKVVVHKETEITPEDGED

SEQ ID NO: 399 - DNA, 1372 bp, Homo sapiens
gcacgagggcgcttttgtctccggtgagttttgtggcgggaagcttctgcgctggtgcttagtaaccgactttcctccggactcctgcacgacctgctcctacagccggcgatccactcccggctgttcccccggagggtccagaggcctttcagaaggagaaggcagctctgtttctctgcagaggagtagggtcctttcagccatgaagcatgtgttgaacctctacctgttaggtgtggtactgaccctactctccatcttcgttagagtgatggagtccctagaaggcttactagagagcccatcgcctgggacctcctggaccaccagaagccaactagccaacacagagcccaccaagggccttccagaccatccatccagaagcatgtgataagacctccttccatactggccatattttggaacactgacctagacatgtccagatgggagtcccattcctagcagacaagctgagcaccgttgtaaccagagaactattactaggccttgaagaacctgtctaactggatgctcattgcctgggcaaggcctgtttaggccggttgcggtggctcatgcctgtaatcctagcactttgggaggctgaggtgggtggatcacctgaggtcaggagttcgagaccagcctcgccaacatggcgaaaccccatctctactaaaaatacaaaagttagctgggtgtggtggcagaggcctgtaatcccagttccttgggaggctgaggcgggagaattgcttgaacccggggacggaggttgcagtgaaccgagatcgcactgctgtacccagcctgggccacagtgcaagactccatctcaaaaaaaaaaagaaaagaaaaagcctgtttaatgcacaggtgtgagtggattgcttatggctatgagataggttgatctcgcccttaccccggggtctggtgtatgctgtgctttcctcagcagtatggctctgacatctcttagatgtcccaacttcagctgttgggagatggtgatattttcaaccctacttcctaaacatctgtctggggttcctttagtcttgaatgtcttatgctcaattatttggtgttgagcctctcttccacaagagctcctccatgtttggatagcagttgaagaggttgtgtgggtgggctgttgggagtgaggatggagtgttcagtgcccatttctcattttacattttaaagtcgttcctccaacatagtgtgtattggtctgaagggggtggtgggatgccaaagcctgctcaagttatggacattgtggccaccatgtggcttaaatgattttttctaactaataaagtggaatatatatttcaaaaaaaaaaaaaaaaaa

SEQ ID NO: 400 - protein, 63 aa, Homo sapiens
MKHVLNLYLLGVVLTLLSIFVRVMESLEGLLESPSPGTSWTTRSQLANTEPTKGLPDHPSRSM

SEQ ID NO: 401 - DNA, 1440 bp, Homo sapiens
gaattccccccccccccccctcacttggtgtgtctatatgtctggcagacattatcagcacattctctgttgttacctgtgattcattttttcttcactctccaggtgaatttcaattgctgaaaatttcccactgaaaatatgcagtaatatattttgtggttcagacatttggggcaaatggttcacattcattttagggttagtggtcatgctgtttatttttctctgctatacaaagttcctcttaggggtctgcctcatgacactaaaaaatgaatagagattctactgtaggttatctcctaggcttgagttcaacatttgtttggatttttgaagaaagtcaaatcaagcaatgctcccaaatgatgtctttgtaaattcataccctctggccctattttttttcatagaccctaactctacctttctgctttaaagcaaagtaaactcggtggcctcttcttctccacccctcaaaatgatagcaatctctgccgtcagcagtgcactcctgttctcccttctctgtgaagcaagtaccgtcgtcctactcaattccactgactcatccccgccaaccaataatttcactgatattgaagcagctctgaaagcacaattagattcagcggatatccccaaagccaggcggaagcgctacatttcgcagaatgacatgatcgccattcttgattatcataatcaagttcggggcaaagtgttcccaccggcagcaaatatggaatatatggtttgggatgaaaatcttgcaaaatcggcagaggcttgggcggctacttgcatttgggaccatggaccttcttacttactgagatttttgggccaaaatctatctgtacgcactggaagatatcgctctattctccagttggtcaagccatggtatgatgaagtgaaagattatgcttttccatatccccaggattgcaaccccagatgtcctatgagatgttttggtcccatgtgcacacattatacgcagatggtttgggccacttccaatcggataggatgcgcaattcatacttgccaaaacatgaatgtttggggatctgtgtggcgacgtgcagtttacttggtatgcaactatgccccaaagggcaattggattggagaagcaccatataaagtaggggtaccatgttcatcttgtcctccaagttatgggggatcttgtactgacaatctgtgttttccaggagttacgtcaaactacctgtactggtttaaataagtttaccttttcctccaggaaatataatgatttctgggaacatgggcatgtatatatatatatggagagagaattttgcacatattatacatattttgtgctaatcttgttttcctcttagtattcctttgtataaattagtgtttgtctagcatgtttgtttaatcctttgggaattc

SEQ ID NO: 402 - protein, 258 aa, Homo sapiens
MIAISAVSSALLFSLLCEASTVVLLNSTDSSPPTNNFTDIEAALKAQLDSADIPKARRKRYISQNDMIAILDYHNQVRGKVFPPAANMEYMVWDENLAKSAEAWAATCIWDHGPSYLLRFLGQNLSVRTGRYRSILQLVKPWYDEVKDYAFPYPQDCNPRCPMRCFGPMCTHYTQMVWATSNRIGCAIHTCQNMNVWGSVWRRAVYLVCNYAPKGNWIGEAPYKVGVPCSSCPPSYGGSCTDNLCFPGVTSNYLYWFK

SEQ ID NO: 403 - DNA, 931 bp, Homo sapiens
gcagagcccagggagctggaggtcggcgcttcctctcgtgcttggtccactgacgcgcggccccgccgcgaggagcatcagatccatgctgctgctgactcggagccccacagcttggcacaggctctctcagctcaagcctccggtcctccctgggaccctgggaggccaggccctgcatctgaggtcctggcttttgtcaaggcagggccctgcagagacaggtgggcagggccagccccagggccctgggcttcgaacccggctgctgatcacaggcctgttcggggctggactcggtggggcctggctggccctgagggctgagaaggagaggctgcagcagcaaaagcgaacagaagccctgcgccaggcagctgtgggccagggcgacttccacctgctggatcacagaggccgggctcgctgcaaggctgacttccggggccagtgggtgctgatgtactttggcttcactcactgccctgacatctgcccagacgagctggagaagctggtgcaggtggtgcggcagctggaagcagagcctggtttgcctccagtgcagcctgtcttcatcactgtggaccccgagcgggacgacgttgaagccatggcccgctacgtccaggacttccacccaagactgttgggtctgaccggctccaccaaacaggttgcccaggctagtcacagttaccgcgtgtactacaatgccggccccaaggatgaggaccaggactacatcgtggaccactccattgccatctacctgctcaaccctgacggcctcttcacggattactacggccggagcagatcggctgagcagatctcagacagtgtgcggcggcacatggcggctttccgcagtgtcctgtcttgagccactgcagtctgggccccatcattaaacgggctgcgtttaaaa

SEQ ID NO: 404 - protein, 266 aa, Homo sapiens
MLLLTRSPTAWHRLSQLKPPVLPGTLGGQALHLRSWLLSRQGPAETGGQGQPQGPGLRTRLLITGLFGAGLGGAWLALRAEKERLQQQKRTEALRQAAVGQGDFHLLDHRGRARCKADFRGQWVLMYFGFTHCPDICPDELEKLVQVVRQLEAEPGLPPVQPVFITVDPERDDVEAMARYVQDFHPRLLGLTGSTKQVAQASHSYRVYYNAGPKDEDQDYIVDHSIAIYLLNPDGLFTDYYGRSRSAEQISDSVRRHMAAFRSVLS

SEQ ID NO: 405 - DNA, 3380 bp, Homo sapiens
gcgcgccggcctgagagccctgtggacaacctcgtcattgtcaggcacagagcggtagaccctgcttctctaagtgggcagcggacagcggcacgcacatttcacctgtcccgcagacaacagcaccatctgcttgggagaaccctctcccttctctgagaaagaaagatgtcgaatgggtattccacagacgagaatttccgctatctcatctcgtgcttcagggccagggtgaaaatgtacatccaggtggagcctgtgctggactacctgacctttctgcctgcagaggtgaaggagcagattcagaggacagtcgccacctccgggaacatgcaggcagttgaactgctgctgagcaccttggagaagggagtctggcaccttggttggactcgggaattcgtggaggccctccggagaaccggcagccctctggccgcccgctacatgaaccctgagctcacggacttgccctctccatcgtttgagaacgctcatgatgaatatctccaactgctgaacctccttcagcccactctggtggacaagcttctagttagagacgtcttggataagtgcatggaggaggaactgttgacaattgaagacagaaaccggattgctgctgcagaaaacaatggaaatgaatcaggtgtaagagagctactaaaaaggattgtgcagaaagaaaactggttctctgcatttctgaatgttcttcgtcaaacaggaaacaatgaacttgtccaagagttaacaggctctgattgctcagaaagcaatgcagagattgagaatttatcacaagttgatggtcctcaagtggaagagcaacttctttcaaccacagttcagccaaatctggagaaggaggtctggggcatggagaataactcatcagaatcatcttttgcagattcttctgtagtttcagaatcagacacaagtttggcagaaggaagtgtcagctgcttagatgaaagtcttggacataacagcaacatgggcagtgattcaggcaccatgggaagtgattcagatgaagagaatgtggcagcaagagcatccccggagccagaactccagctcaggccttaccaaatggaagttgcccagccagccttggaagggaagaatatcatcatctgcctccctacagggagtggaaaaaccagagtggctgtttacattgccaaggatcacttagacaagaagaaaaaagcatctgagcctggaaaagttatagttcttgtcaataaggtactgctagttgaacagctcttccgcaaggagttccaaccatttttgaagaaatggtatcgtgttattggattaagtggtgatacccaactgaaaatatcatttccagaagttgtcaagtcctgtgatattattatcagtacagctcaaatccttgaaaactccctcttaaacttggaaaatggagaagatgctggtgttcaattgtcagacttttccctcattatcattgatgaatgtcatcacaccaacaaagaagcagtgtataataacatcatgaggcattatttgatgcagaagttgaaaaacaatagactcaagaaagaaaacaaaccagtgattccccttcctcagatactgggactaacagcttcacctggtgttggaggggccacgaagcaagccaaagctgaagaacacattttaaaactatgtgccaatcttgatgcatttactattaaaactgttaaagaaaaccttgatcaactgaaaaaccaaatacaggagccatgcaagaagtttgccattgcagatgcaaccagagaagatccatttaaagagaaacttctagaaataatgacaaggattcaaacttattgtcaaatgagtccaatgtcagattttggaactcaaccctatgaacaatgggccattcaaatggaaaaaaaagctgcaaaaaaaggaaatcgcaaagaacgtgtttgtgcagaacatttgaggaagtacaatgaggccctacaaattaatgacacaattcgaatgatagatgcgtatactcatcttgaaactttctataatgaagagaaagataagaagtttgcagtcatagaagatgatagtgatgagggtggtgatgatgagtattgtgatggtgatgaagatgaggatgatttaaagaaacctttgaaactggatgaaacagatagatttctcatgactttattttttgaaaacaataaaatgttgaaaaggctggctgaaaacccagaatatgaaaatgaaaagctgaccaaattaagaaataccataatggagcaatatactaggactgaggaatcagcacgaggaataatctttacaaaaacacgacagagtgcatatgcgctttcccagtggattactgaaaatgaaaaatttgctgaagtaggagtcaaagcccaccatctgattggagctggacacagcagtgagttcaaacccatgacacagaatgaacaaaaagaagtcattagtaaatttcgcactggaaaaatcaatctgcttatcgctaccacagtggcagaagaaggtctggatattaaagaatgtaacattgttatccgttatggtctcgtcaccaatgaaatagccatggtccaggcccgtggtcgagccagagctgatgagagcacctacgtcctggttgctcacagtggttcaggagttatcgaacatgagacagttaatgatttccgagagaagatgatgtataaagctatacattgtgttcaaaatatgaaaccagaggagtatgctcataagattttggaattacagatgcaaagtataatggaaaagaaaatgaaaaccaagagaaatattgccaagcattacaagaataacccatcactaataactttcctttgcaaaaactgcagtgtgctagcctgttctggggaagatatccatgtaattgagaaaatgcatcacgtcaatatgaccccagaattcaaggaactttacattgtaagagaaaacaaagcactgcaaaagaagtgtgccgactatcaaataaatggtgaaatcatctgcaaatgtggccaggcttggggaacaatgatggtgcacaaaggcttagatttgccttgtctcaaaataaggaattttgtagtggttttcaaaaataattcaacaaagaaacaatacaaaaagtgggtagaattacctatcacatttcccaatcttgactattcagaatgctgtttatttagtgatgaggattagcacttgattgaagattcttttaaaatactatcagttaaacatttaatatgattatgattaatgtattcattatgctacagaactgacataagaatcaataaaatgattgttttactctgaaaaaaaaaaaaaaa

SEQ ID NO: 406 - protein, 1025 aa, Homo sapiens [sequence omitted]

SEQ ID NO: 407 - DNA, 1776 bp, Homo sapiens
gagagggtggggagatgacacagttgttcccccagccctggcggggcgggcagcatggttcactccagcatgggggctccagaaataagaatgtctaagcccctggaggccgagaagcaaggtctggactccccatcagagcacacagacaccgaaagaaatggaccagacactaatcatcagaacccccaaaataagacctccccattctccgtgtccccaactggccccagtacaaagatcaaggctgaagaccccagtggcgattcagccccagcagcacccctgccccctcagccggcccagcctcatctgccccaggcccaactcatgttgacgggcagccagctagctggggacatacagcagctcctccagctccagcagctggtgcttgtgccaggccaccacctccagccacctgctcagttcctgctaccgcaggcccagcagagccagccaggcctgctaccgacaccaaatctattccagctacctcagcaaacccagggagctcttctgacctcccagccccgggccgggcttcccacacagccccccaaatgcttggagccaccatcccaccccgaggagcccagtgatctggaggagctggagcaattcgcccgcaccttcaagcaacgccgcatcaagctgggcttcacgcagggtgatgtgggcctggccatgggcaagctctacggcaacgacttcagccagacgaccatttcccgcttcgaggccctcaacctgagcttcaagaacatgtgcaaactcaagcccctcctggagaagtggctcaacgatgcagagactatgtctgtggactcaagcctgcccagccccaaccagctgagcagccccagcctgggtttcgacggcctgcccggccggagacgcaagaagaggaccagcatcgagacaaacgtccgcttcgccttagagaagagttttctagcgaaccagaagcctacctcagaggagatcctgctgatcgccgagcagctgcacatggagaaggaagtgatccgcgtctggttctgcaaccggcgccagaaggagaaacgcatcaacccctgcagtgcggcccccatgctgcccagcccagggaagccggccagctacagcccccatatggtcacaccccaagggggcgcggggaccttaccgttgtcccaagcttccagcagtctgagcacaacagcacaaaccccagccctcaaggcagccactcggctatcggcttgtcaggcctgaaccccagcacgggccctggcctctggtggaaccctgccccttaccagccttgatggcagcgggaatctggtgctgggggcagccggtgcagccccggggagccctggcctggtgacctcgccgctcttcttgaatcatgctgggctgcccctgctcagcaccccgcctggtgtgggcctggtctcagcagcggctgcggctgtggcagcctccatctccagcaagtctcctggcctctcctcctcatcctcttcatcctcatcctcctcctcctccacttgcagcgagacggcagcacagacccctggaggtccaggggggcccgaggcagggtccaaacctgagtgagggccagccatgcctcccctcccattcctctggtccctgccttggtcccttgcctgggaagagggcgaggaggccagtggtggggacgcagagggtcctcagagcaggagtgacaagggaggaaagaccaaaaaaacaaccaaccaaaaaaaaaaaaaaaaaaaaaaaaaa

SEQ ID NO: 408 - protein, 400 aa, Homo sapiens
MVHSSMGAPEIRMSKPLEAEKQGLDSPSEHTDTERNGPDTNHQNPQNKTSPFSVSPTGPSTKIKAEDPSGDSAPAAPLPPQPAQPHLPQAQLMLTGSQLAGDIQQLLQLQQLVLVPGHHLQPPAQFLLPQAQQSQPGLLPTPNLFQLPQQTQGALLTSQPRAGLPTQPPKCLEPPSHPEEPSDLEELEQFARTFKQRRIKLGFTQGDVGLAMGKLYGNDFSQTTISRFEALNLSFKNMCKLKPLLEKWLNDAETMSVDSSLPSPNQLSSPSLGFDGLPGRRRKKRTSIETNVRFALEKSFLANQKPTSEEILLIAEQLHMEKEVIRVWFCNRRQKEKRINPCSAAPMLPSPGKPASYSPHMVTPQGGAGTLPLSQASSSLSTTAQTPALKAATRLSACQA

SEQ ID NO: 409 - DNA, 1442 bp, Homo sapiens
tttttttttttgagatggagttttcgctcttgttgcccaggctggagtgcaatggcgcaatctcagctcaccgcaacctccgcctcccgggttcaagcgattctcctgcctcagcctccccagtagctgggattacaggcatgtgcacccacgctcggctaattttgtatttttttttagtagagatggagtttctccatgttggtcaggctggtctcgaactcccgacctcagatgatccctccgtctcggcctcccaaagtgctagatacaggactggccaccatgcccggctctgcctggctaatttttgtggtagaaacagggtttcactgatgtgcccaagctggtctcctgagctcaagcagtccacctgcctcagcctcccaaagtgctgggattacaggcgtgcagccgtgcctggcctttttattttattttttttaagacacaggtgtcccactcttacccaggatgaagtgcagtggtgtgatcacagctcactgcagccttcaactcctgagatcaagcatcctcctgcctcagcctcccaagtagctgggaccaaagacatgcaccactacacctggctaatttttatttttatttttaattttttgagacagagtctcaactctgtcacccaggctggagtgcagtggcgcaatcttggctcactgcaacctctgcctcccgggttcaagttattctcctgccccagcctcctgagtagctgggactacaggcgcccaccacgcctagctaatttttttgtatttttagtagagatggggttcaccatgttcgccaggttgatcttgatctctggaccttgtgatctgcctgcctcggcctcccaaagtgctgggattacaggcgtgagccaccacgcccggcttatttttaatttttgtttgtttgaaatggaatctcactctgttacccaggctggagtgcaatggccaaatctcggctcactgcaacctctgcctcccgggctcaagcgattctcctgtctcagcctcccaagcagctgggattacgggcacctgccaccacaccccgctaatttttgtattttcattagaggcggggtttcaccatatttgtcaggctggtctcaaactcctgacctcaggtgacccacctgcctcagccttccaaagtgctgggattacaggcgtgagccacctcacccagccggctaatttagataaaaaaatatgtagcaatggggggtcttgctatgttgcccaggctggtctcaaacttctggcttcatgcaatccttccaaatgagccacaacacccagccagtcacattttttaaacagttacatctttattttagtatactagaaagtaatacaataaacatgtcaaacctgcaaattcagtagtaacagagttcttttataacttttaaacaaagctttagagca

SEQ ID NO: 410 - protein, 375 aa, Homo sapiens [sequence omitted]

SEQ ID NO: 411 - DNA, 915 bp, Homo sapiens
atgatttacacaatgaagaaagtacatgcactttgggcttctgtatgcctgctgcttaatcttgcccctgcccctcttaatgctgattctgaggaagatgaagaacacacaattatcacagatacggagttgccaccactgaaacttatgcattcattttgtgcattcaaggcggatgatggcccatgtaaagcaatcatgaaaagatttttcttcaatattttcactcgacagtgcgaagaatttatatatgggggatgtgaaggaaatcagaatcgatttgaaagtctggaagagtgcaaaaaaatgtgtacaagagataatgcaaacaggattataaagacaacattgcaacaagaaaagccagatttctgctttttggaagaagatcctggaatatgtcgaggttatattaccaggtatttttataacaatcagacaaaacagtgtgaacgtttcaagtatggtggatgcctgggcaatatgaacaattttgagacactggaagaatgcaagaacatttgtgaagatggtccgaatggtttccaggtggataattatggaacccagctcaatgctgtgaataactccctgactccgcaatcaaccaaggttcccagcctttttgaatttcacggtccctcatggtgtctcactccagcagacagaggattgtgtcgtgccaatgagaacagattctactacaattcagtcattgggaaatgccgcccatttaagtacagtggatgtgggggaaatgaaaacaattttacttccaaacaagaatgtctgagggcatgtaaaaaaggtttcatccaaagaatatcaaaaggaggcctaattaaaaccaaaagaaaaagaaagaagcagagagtgaaaatagcatatgaagaaatttttgttaaaaatatgtga

SEQ ID NO: 412 - protein, 304 aa, Homo sapiens
MIYTMKKVHALWASVCLLLNLAPAPLNADSEEDEEHTIITDTELPPLKLMHSFCAFKADDGPCKAIMKRFFFNIFTRQCEEFIYGGCEGNQNRFESLEECKKMCTRDNANRIIKTTLQQEKPDFCFLEEDPGICRGYITRYFYNNQTKQCERFKYGGCLGNMNNFETLEECKNICEDGPNGFQVDNYGTQLNAVNNSLTPQSTKVPSLFEFHGPSWCLTPADRGLCRANENRFYYNSVIGKCRPFKYSGCGGNENNFTSKQECLRACKKGFIQRISKGGLIKTKRKRKKQRVKIAYEEIFVKNM

SEQ ID NO: 413 - DNA, 920 bp, Homo sapiens
tgtctgtcagagctgtcagcctgcttaagcagagtaaaatggtacaggcagtgcagcctggtagcgagaaaaaaggctgcctgtgaaatcccactgtgggaccataagtggggacctcagggccccttcatggcatctccatggccatgtcatgctggagaaggaggcgtttcaagaatgtgagctgatcgctggaaactgctcatctgactccagtctcaaaagaggctatgtgcaagaatcgggtgaagttgtgagaccccatccacccctcacaagattgtatccccaccctgtctgaccttactgctgctcaaactatctgtccaaggatgaaaacccaggacaaaggaggagtaaccctcatgatgtgaagcacgtgttcacctgtgaatataacctgaggatcatgagactatctgtggatttcacagagaagacagacgagaagacaccgctgacacttctccacggaggtctccttttccaccaagatgcagatgcttcttgcaaggactatcctgtgaatcccacagagaagacaggtgtggttccaatgccggtgcacctccagggaattctccttctctaccaagctccaggccttctgccatgatcatgagactatttgtggatttcacagagaagataggtgaaggtacagcatggcatccacccctcaccagaggggtatccccacccctatctgaccttattaccttattgctgttcaaagtctctatcccagactgaaatcccaagacaatggagaagttccccctgatgatgtgaagcaccaactcctctgggaatcaaattcgaggtaaatttaataggcccggtagagatgaatgatagtgtctctccttggattggctgaaagacaattaaacactggtatatttctgttaaaaaaaaaa

SEQ ID NO: 414 - protein, 60 aa, Homo sapiens
CLSELSACLSRVKWYRQCSLVARKKAACEIPLWDHKWGPQGPFMASPWPCHAGEGGVSRM

SEQ ID NO: 415 - DNA, 2774 bp, Homo sapiens
tcctgccgcttggccgcggggcgcctggctcagtggcttctgcgggcttcgaggagcgggatgttgcgggctgggtggctccggggcgcggcggcgctggcgctgctgctggcggcccgagtggtggcggcgttcgagcccatcaccgtgggcctagccatcggggccgcgtcggccatcaccggctacctgtcctacaatgacatctactgccgcttcgccgagtgctgccgcgaggagcggccgctcaacgcttcggctctcaagctggatttggaggagaagctgtttggacagcatctagccacggaagtgattttcaaggcgctgactggcttcaggaacaacaaaaatcccaagaaaccactgaccctttccttacacggctgggctggcacaggcaagaattttgtcagtcaaattgtggctgaaaatcttcacccaaaaggtctgaagagtaactttgtccacctgtttgtatcgactctgcacttccctcatgagcagaagataaaactgtaccaggaccagttacagaagtggatccgcggtaatgtgagtgcatgtgcgaactctgttttcatatttgacgagatggataaattgcaccccgggatcattgacgcaatcaagccgtttctagactactacgagcaggttgacggagtgtcttaccgcaaagccatcttcatctttctcagcaatgcaggcggggaccttataactaagacggctcttgacttttggcgggccggaagaaagagggaagacattcagctgaaggacctggaacctgtactgtctgtcggagtcttcaataataaacacagtggcctgtggcacagtggactgatcgacaaaaacctcattgattactttatccccttcctgcctttggagtacagacatgtgaaaatgtgtgtgagggccgagatgagggcccgtggttctgccatagatgaagacattgtcacaagagtggcagaggaaatgacgtttttccccagagacgagaaaatctactcagacaagggctgcaagactgtgcagtcgcggctggatttccactgagctcctatccagatggggtaggagacagctgggaggctccgcacgccagaggccttgcctttcagaagaaccctgaagaccgctttggggttttgcctgtttgcaccttagacttttgggtatagaatcttttttttgagaagaggtctcactccgtcatccaagctggagtgcagtggtgcaatcctcaactcactgcaacctccgctcccggtttgagtgattctcatgcctcagcctcccgagtagctgggattacaggcatgagccactgtgcccagctgggatatagaatctaagagttgattgtggaaaacacgtgaatctattgcgcgcatttgtcatttagcaagatggcagcagtccagctgttctttgcagctggagatgaacttttaaaaatccccttcacacttaatgtactgaccgagacagaagtacctgaaaacagctgtgcatggcaggcccggcaatagcttctgacccacagcacccgcgcctcagaagctacggtcacaactaaaggagtccagggacttgctgcaggctggggggcactgggtggttctcaccagcaggctgcggggcactgtgttctcattggccaaaaacatccttttgctctgtctcgttctttacacagagttcactgacttgaagtatactcagttaaaatcggggctggaggtgcagacggtgtctgaccggaggatgtggccgtgcccgccgagcactcttgatctgagctgacctgtgtgtgtgtgtgggggggggtggggccttcacctaagacctctgcagcagacctggacagacaggcccctcccgcctgtccatcgctctagctgctaatacagccctggctgtggaatccttcaccgtctcagctggtatcagccccagcctgccttgtgccatatctcagcttggatctctgctagagtccccccaaccatatatcatagagttgaatcacaatgagaccgttggctttgaatttgagtcgttggttcccatggtgagatgcttgttaagactttatacttgggtcaatctctcactttattttgtagaaccatttgaaatcctaggatgtgcttgttctggaaggatgacatgggcccagactgaacaagtcagcttgatgatcttaaatgatggaagtataggacgttgcttattttaaaacaagggaaggacacaaaatggaatgactgcttagtcctttctcagatactcttaaaacaattttttattgttaaatttgtggtaatacatggtcacaaccgtggatcaaacaaggtcagtctaaagtggcaggtcctaggtgtgacctgataccaccaccctttgtggcagcaccgggctggactgccctgatccctgggacgtgagacttagcttccagccagtgtgaatcattgtatctgtctcataatcacagcacagctgcagacacaacaacgtgcagcattttttacataaaaatatggtagaattaatttatgacatggaaatgccttacgtggtatcacacttagtcttgaaaaaaacaccaaggtgacgtttaaaatttttagtacatatcctcaaattggagctaagttatacttcttttataaccttttgggcatctggtcgagagaagacaagattttctctatttacagtgaggcaataaatatgtttgccacctttaaaaa

SEQ ID NO: 416 - protein, 336 aa, Homo sapiens
MLRAGWLRGAAALALLLAARVVAAFEPITVGLAIGAASAITGYLSYNDIYCRFAECCREERPLNASALKLDLEEKLFGQHLATEVIFKALTGFRNNKNPKKPLTLSLHGWAGTGKNFVSQIVAENLHPKGLKSNFVHLFVSTLHFPHEQKIKLYQDQLQKWIRGNVSACANSVFIFDEMDKLHPGIIDAIKPFLDYYEQVDGVSYRKAIFIFLSNAGGDLITKTALDFWRAGRKREDIQLKDLEPVLSVGVFNNKHSGLWHSGLIDKNLIDYFIPFLPLEYRHVKMCVRAEMRARGSAIDEDIVTRVAEEMTFFPRDEKIYSDKGCKTVQSRLDFH

SEQ ID NO: 417 - DNA, 1496 bp, Homo sapiens
cgcactccctgctgggtgagcagcactgtaaagatgaagctggctaactggtactggctgagctcagctgttcttgccacttacggttttttggttgtggcaaacaatgaaacagaggaaattaaagatgaaagagcaaaggatgtctgcccagtgagactagaaagcagagggaaatgcgaagaggcaggggagtgcccctaccaggtaagcctgccccccttgactattcagctcccgaagcaattcagcaggatcgaggaggtgttcaaagaagtccaaaacctcaaggaaatcgtaaatagtctaaagaaatcttgccaagactgcaagctgcaggctgatgacaacggagacccaggcagaaacggactgttgttacccagtacaggagccccgggagaggttggtgataacagagttagagaattagagagtgaggttaacaagctgtcctctgagctaaagaatgccaaagaggagatcaatgtacttcatggtcgcctggagaagctgaatcttgtaaatatgaacaacatagaaaattatgttgacagcaaagtggcaaatctaacatttgttgtcaatagtttggatggcaaatgttcaaagtgtcccagccaagaacaaatacagtcacgtccagttcaacatctaatatataaagattgctctgactactacgcaataggcaaaagaagcagtgagacctacagagttacacctgatcccaaaaatagtagctttgaagtttactgtgacatggagaccatggggggaggctggacagtgctgcaggcacgtctcgatgggagcaccaacttcaccagaacatggcaagactacaaagcaggctttggaaacctcagaagggaattttggctggggaacgataaaattcatcttctgaccaagagtaaggaaatgattctgagaatagatcttgaagactttaatggtgtcgaactatatgccttgtatgatcagttttatgtggctaatgagtttctcaaatatcgtttacacgttggtaactataatggcacagctggagatgcattacgtttcaacaaacattacaaccacgatctgaagtttttcaccactccagataaagacaatgatcgatatccttctgggaactgtgggctgtactacagttcaggctggtggtttgatgcatgtctttctgcaaacttaaatggcaaatattatcaccaaaaatacagaggtgtccgtaatgggattttctggggtacctggcctggtgtaagtgaggcacaccctggtggctacaagtcctccttcaaagaggctaagatgatgatcagacccaagcactttaagccataaatcactctgttcattcctccaggtattcgttatctaatagggcaattaattccttcagcactttagaatatgccttgtttcatatttttcatagctaaaaaatgtttgacatcctttgagatattttattactaaaatctgcc

SEQ ID NO: 418 - protein, 439 aa, Homo sapiens
MKLANWYWLSSAVLATYGFLVVANNETEEIKDERAKDVCPVRLESRGKCEEAGECPYQVSLPPLTIQLPKQFSRIEEVFKEVQNLKEIVNSLKKSCQDCKLQADDNGDPGRNGLLLPSTGAPGEVGDNRVRELESEVNKLSSELKNAKEEINVLHGRLEKLNLVNMNNIENYVDSKVANLTFVVNSLDGKCSKCPSQEQIQSRPVQHLIYKDCSDYYAIGKRSSETYRVTPDPKNSSFEVYCDMETMGGGWTVLQARLDGSTNFTRTWQDYKAGFGNLRREFWLGNDKIHLLTKSKEMILRIDLEDFNGVELYALYDQFYVANEFLKYRLHVGNYNGTAGDALRFNKHYNHDLKFFTTPDKDNDRYPSGNCGLYYSSGWWFDACLSANLNGKYYHQKYRGVRNGIFWGTWPGVSEAHPGGYKSSFKEAKMMIRPKHFKP

SEQ ID NO: 419 - DNA, 1403 bp, Homo sapiens
gcttccgctttggggtggtggtgccacccgccgtggccggcgcccggccggagctgctggtggtggggtcgcggcccgagctggggcgttgggagccgcgcggtgccgtccgcctgaggccggccggcaccgcggcgggcgacggggccctggcgctgcaggagccgggcctgtggctcggggaggtggagctggcggccgaggaggcggcgcaggacggggcggagccgggccgcgtggacacgttctggtacaagttcctgaagcgggagccgggaggagagctctcctgggaaggcaatggacctcatcatgaccgttgctgtacttacaatgaaaacaacttggtggatggtgtgtattgtctcccaataggacactggattgaggccactgggcacaccaatgaaatgaagcacacaacagacttctattttaatattgcaggccaccaagccatgcattattcaaggccgagtacagatgctgccccaggcggtgtgcctgctgcatgcgctgctggagaagggacacatcgtgtacgtgcactgcaacgctggggtgggccgctccaccgcggctgtctgcggctggctccagtatgtgatgggctggaatctgaggaaggtgcagtatttcctcatggccaagaggccggctgtctacattgacgaagaggccttggcccgggcacaagaagattttttccagaaatttgggaaggttcgttcttctgtgtgtagcctgtagctggtcagcctgcttctgccccctcctgatttccctaaggagcctgggatgatgttggtcaaatgacctagaaacaaggattctacctgaactgaaaggactgtgtgacctcccccaagccaaccactttcacctgggatgactttcgattatgctttgttttggggctgtatttttgaaatactctacaagaaagctgtggctcaacacatgagaagaagcacgaagcagttaggctgtacatcagacagaagggtaatgcgtgcagttcctgctgcctgcaggcagacgaggcctttgctttacagcactgtatgtgttgcacgatggatccgtgacagcactttcctgttgcactgaaactcttggccatgtagaggaaaagatatggagttatgtggatttcatcactagtatgtgtgcgtgagctggtcagttgccaaaggaggaaataaggttagaagcctgaaccgttacaaaagaagagctcactatggtcaaaaagtgatggctttcaggacttgttttttatcctgcctcacagttgttaaagtctgttccaaggcatcaccttccttctctacccaacaaccctgtgtaacaactaaagtagaattatctccaaaaaaaaaaaaaaaaaaaaaaaaaaaaaa

SEQ ID NO: 420 - protein, 88 aa, Homo sapiens
MLPQAVCLLHALLEKGHIVYVHCNAGVGRSTAAVCGWLQYVMGWNLRKVQYFLMAKRPAVYIDEEALARAQEDFFQKFGKVRSSVCSL

SEQ ID NO: 421 - DNA, 2053 bp, Homo sapiens
gctggacgtgggatccacacagctcagaacagttggatcttgctcagtctctgtcagaggaagatcccttggacaagaggaccctgccttggtgtgagagtgagggtagaggaagctggaacgagggttaaggaaaaccttccagtctggacagtgactggagagctccaaggaaagcccctcggtaacccagccgctggcaccatgaacccagagagcagtatctttattgaggattaccttaagtatttccaggaccaagtgagcagagagaatctgctacaactgctgactgatgatgaagcctggaatggattcgtggctgctgctgaactgcccagggatgaggcagatgagctccgtaaagctctgaacaagcttgcaagtcacatggtcatgaaggacaaaaaccgccacgataaagaccagcagcacaggcagtggtttttgaaagagtttcctcggttgaaaagggagcttgaggatcacataaggaagctccgtgcccttgcagaggaggttgagcaggtccacagaggcaccaccattgccaatgtggtgtccaactctgttggcactacctctggcatcctgaccctcctcggcctgggtctggcacccttcacagaaggaatcagttttgtgctcttggacactggcatgggtctgggagcagcagctgctgtggctgggattacctgcagtgtggtagaactagtaaacaaattgcgggcacgagcccaagcccgcaacttggaccaaagcggcaccaatgtagcaaaggtgatgaaggagtttgtgggtgggaacacacccaatgttcttaccttagttgacaattggtaccaagtcacacaagggattgggaggaacatccgtgccatcagacgagccagagccaaccctcagttaggagcgtatgccccacccccgcatgtcattgggcgaatctcagctgaaggcggtgaacaggttgagagggttgttgaaggccccgcccaggcaatgagcagaggaaccatgatcgtgggtgcagccactggaggcatcttgcttctgctggatgtggtcagccttgcatatgagtcaaagcacttgcttgagggggcaaagtcagagtcagctgaggagctgaagaagcgggctcaggagctggaggggaagctcaactttctcaccaagatccatgagatgctgcagccaggccaagaccaatgaccccagagcagtgcagccaccagggcagaaatgccgggcacaggccaggacaaaatgcagactttttttttttttttttttttttttgagatggagtctcgctctatcgcccaggatggagtgcagtggctcaatctcggctcactgcaaactccgcctcccgggttcacaccattctccggcctcagtctcccgagtagctgggactacaggcacctgccaccacgcccggctaatttttttgtattttcactggagacggggtttcactgtgttagccacgatggtctccatctcctgacctcgtgatctgcccacctcggcctcccaaagtgctgggattacaggcgtgagccaccgcgcctggccaaaatgcagacattttattagggggataaggagggcaaggtaaagcttatggaactgagtgttagtgactttggcatttgtgtagctgagcacagcaagggaggggttaatgcagatggcaagtgcaccaaggagaaggcaggaacactggagcctgcaataagggaggagagaggactggagagtgtggggaatgggaagaagtagtttactttggactaaagaatatattgggcgaagaatagagggggagcttgcaggaaccagcaatgagaaggccaggaaaagaaagagctgaaaatggagaaaaccagagttagaactgttggatacaggagaagaaacagcagctccactaccgacccccccccaggtttgatgtccttccaagaataaagtctttccctggtgaaaaaaaaaaaaaaaaaaaaaaaaaaaaaaaaaaaaaaaaaaaaaaaaaaaaaaa

SEQ ID NO: 422 - protein, 337 aa, Homo sapiens
MNPESSIFIEDYLKYFQDQVSRENLLQLLTDDEAWNGFVAAAELPRDEADELRKALNKLASHMVMKDKNRHDKDQQHRQWFLKEFPRLKRELEDHIRKLRALAEEVEQVHRGTTIANVVSNSVGTTSGILTLLGLGLAPFTEGISFVLLDTGMGLGAAAAVAGITCSVVELVNKLRARAQARNLDQSGTNVAKVMKEFVGGNTPNVLTLVDNWYQVTQGIGRNIRAIRRARANPQLGAYAPPPHVIGRISAEGGEQVERVVEGPAQAMSRGTMIVGAATGGILLLLDVVSLAYESKHLLEGAKSESAEELKKRAQELEGKLNFLTKIHEMLQPGQDQ

SEQ ID NO: 423 - DNA, 952 bp, Homo sapiens
agagaagacgtgcagggaccccgcgcacaggagctgccctcgcgacatgggtcacccgccgctgctgccgctgctgctgctgctccacacctgcgtcccagcctcttggggcctgcggtgcatgcagtgtaagaccaacggggattgccgtgtggaagagtgcgccctgggacaggacctctgcaggaccacgatcgtgcgcttgtgggaagaaggagaagagctggagctggtggagaaaagctgtacccactcagagaagaccaacaggaccctgagctatcggactggcttgaagatcaccagccttaccgaggttgtgtgtgggttagacttgtgcaaccagggcaactctggccgggctgtcacctattcccgaagccgttacctcgaatgcatttcctgtggctcatcagacatgagctgtgagaggggccggcaccagagcctgcagtgccgcagccctgaagaacagtgcctggatgtggtgacccactggatccaggaaggtgaagaagggcgtccaaaggatgaccgcccactccgtggctgtggctaccttcccggctgcccgggctccaatggtttccacaacaacgacaccttccacttcctgaaatgctgcaacaccaccaaatgcaacgagggcccaatcctggagcttgaaaatctgccgcagaatggccgccagtgttacagctgcaaggggaacagcacccatggatgctcctctgaagagactttcctcattgactgccgaggccccatgaatcaatgtctggtagccaccggcactcacgaaccgaaaaaccaaagctatatggtaagaggctgtgcaaccgcctcaatgtgccaacatgcccacctgggtgacgccttcagcatgaaccacattgatgtctcctgctgtactaaaagtggctgtaaccacccagacctggatgtccagtag

SEQ ID NO: 424 - protein, 301 aa, Homo sapiens [sequence omitted]

SEQ ID NO: 425 - DNA, 1878 bp, Homo sapiens
ggaaaaagcatgacatttagaagtagaagacttagcttcaaatccctactccttcacttactaattttgtgatttggaaatatccgcgcaagatgttgacgttgcagacttgggtagtgcaagccttgtttattttcctcaccactgaatctacaggtgaacttctagatccatgtggttatatcagtcctgaatctccagttgtacaacttcattctaatttcactgcagtttgtgtgctaaaggaaaaatgtatggattattttcatgtaaatgctaattacattgtctggaaaacaaaccattttactattcctaaggagcaatatactatcataaacagaacagcatccagtgtcacctttacagatatagcttcattaaatattcagctcacttgcaacattcttacattcggacagcttgaacagaatgtttatggaatcacaataatttcaggcttgcctccagaaaaacctaaaaatttgagttgcattgtgaacgaggggaagaaaatgaggtgtgagtgggatggtggaagggaaacacacttggagacaaacttcactttaaaatctgaatgggcaacacacaagtttgctgattgcaaagcaaaacgtgacacccccacctcatgcactgttgattattctactgtgtattttgtcaacattgaagtctgggtagaagcagagaatgcccttgggaaggttacatcagatcatatcaattttgatcctgtatataaagtgaagcccaatccgccacataatttatcagtgatcaactcagaggaactgtctagtatcttaaaattgacatggaccaacccaagtattaagagtgttataatactaaaatataacattcaatataggaccaaagatgcctcaacttggagccagattcctcctgaagacacagcatccacccgatcttcattcactgtccaagaccttaaaccttttacagaatatgtgtttaggattcgctgtatgaaggaagatggtaagggatactggagtgactggagtgaagaagcaagtgggatcacctatgaagataacattgcctccttttgaagccaatggaaaaatcttggattatgaagtgactctcacaagatggaaatcacatttacaaaattacacagttaatgccacaaaactgacagtaaatctcacaaatgatcgctatctagcaaccctaacagtaagaaatcttgttggcaaatcagatgcagctgttttaactatccctgcctgtgactttcaagctactcaccctgtaatggatcttaaagcattccccaaagataacatgctttgggtggaatggactactccaagggaatctgtaaagaaatatatacttgagtggtgtgtgttatcagataaagcaccctgtatcacagactggcaacaagaagatggtaccgtgcatcgcacctatttaagagggaacttagcagagagcaaatgctatttgataacagttactccagtatatgctgatggaccaggaagccctgaatccataaaggcataccttaaacaagctccaccttccaaaggacctactgttcggacaaaaaaagtagggaaaaacgaagctgtcttagagtgggaccaacttcctgttgatgttcagaatggatttatcagaaattatactatattttatagaaccatcattggaaatgaaactgctgtgaatgtggattcttcccacacagaatatacattgtcctctttgactagtgacacattgtacatggtacgaatggcagcatacacagatgaaggtgggaaggatggtccagaattcacttttactaccccaaagtttgctcaaggagaaattgaagccatagtcgtg

SEQ ID NO: 426 - protein, 329 aa, Homo sapiens [sequence omitted]

SEQ ID NO: 427 - DNA, 3158 bp, Homo sapiens
cctcgctcccggaccccacggctgcaaactgatctggcgcgcggggaggaggagagcgcaggcgagcgaacccgcgagagagggagagagcgagcgagcaacagcgagagcgagagcgagagagccgggaggcagagggagtagtgaccgccttccggagccgggattcatgcctgtcctcgggaccagcgaaggggactttacggctgagtatgagccaggctgctaggagccaggtacccccacgcctgcagtccccgcgccgtgcccggaatgcgagctggacgcagggctctcccaagttcccaccgagccgaataaaaagcgtccgcccgcagctctccgccaaagacggacattgactccaggactccacagaatggagcaagaatgagaggaaaaaggccggcagaaaagcatgaactggaggtttgttgagctcctctacttcctgtttatatggggccgtatctcagtgcagccctcccaccaggaaccagctgggacagaccaacatgtctccaaggaatttgattggctcatttcagacagggggcctttccaccactccaggagctacctatcctttgtggaaagacaccgtcaaggatttacaaccagatataaaatatacagggagtttgcccgttggaaggtgaggaacacagccatcgagaggagagatctggtccgccatccagtgcccctcatgccggagtttcaaaggagcatccgcctgcttggcaggagacctaccactcagcagttcatcgataccatcatcaaaaagtacggcacccacctgctcatctcagccacattgggaggggaggaggctttgaccatgtatatggacaaaagtcgcctcgacaggaagtcagggaatgccactcaaagtgttgaagctctgcaccagctcgcatcatcctactttgttgaccgtgatggtaccatgaggaggcttcatgagatccagatatcaactggagcaatcaaggtcacagagacacgcactgggcctctgggctgtaacagttatgacaatctggactctgtgagttccgtccttctgcaaagcacggagagcaaactgcaccttcaaggtcttcagataatctttcctcagtatctgcaagagaagtttgtccagtcggccttgagctatatcatgtgcaatggggagggggagtacctgtgccagaacagccagtgtcgctgccaatgtgccgaggagtttccgcagtgcaactgccccatcacggacatccagatcatggagtacacgctggccaacatggccaagtcttgggccgaagcttataaggacctggagaattcagatgagtttaaatcatttatgaagcgcctccccagcaaccacttcctgaccatcggaagcatccatcagcactggggcaatgactgggacctgcagaaccgctacaagctcctgcagagtgccacggaggcacagagacaaaagatccaacgcactgcccgcaagcttttcggcctcagtgtacgctgtcgccacaatcccaaccaccagctgcctagagagaggacaattcagcagtggcttgcaagggtccagtcactcctctactgtaatgagaatgggttttggggaaccttcctggagagccagcggagctgcgtgtgccacggcagcaccacgctgtgccagcgccccatcccctgcgtgataggcgggaacaacagctgcaccatgtgcagcctggccaacatctccctctgtggctcctgcaacaagggctacaagctgtatcgaggccgctgtgaaccacagaacgtggactcggagcggagcgagcagttcatcagctttgagactgacctggacttccaggacctggagctgaagtacctgctgcagaagatggactcacgcctctacgtccacaccaccttcatcagcaacgagatccgcctcgacaccttctttgaccctcggtggcgcaagcgcatgtccctcactctcaagagcaacaagaaccgcatggacttcatccacatggtgatcggcatgtccatgcgcatctgccagatgcgcaacagcagcctggaccccatgttctttgtctatgtcaacccctttagcgggagccattcggagggctggaacatgcccttcggggaatttggctacccacgctgggagaagatccgtctccaaaacagccagtgctacaactggactcttttgctgggcaatcggtggaaaacatttttcgagacggtccacatctacctacgtagtcggactcggctacctaccctactgcgaaatgagactggccagggccccgtggacctgtcggatccctccaagaggcagttctacatcaagatctcagacgtgcaggtgtttgggtatagcctgaggttcaacgccgacctcctgcgcagtgcagtgcagcaggtcaaccagtcctacacacagggcggccagttctattcctcttcgtcagtgatgctcctcttgttggatattcgggaccgaattaatcgcctggcccctcctgtggccccggggaaaccccagctggacttgttctcctgtatgctgaaacaccgcctgaaactgaccaacagcgagatcatcagggtgaaccacgccttggacctgtacaacacggagatcctcaaacagtcggaccagatgacagccaaactctgctaacccgggactccttgccatggacttttcctgttgttgtacacacacaacagaacaaaatgaagcaaaacaaaacaaaaaaacccacaaaaatttgtaaaatgtaattaatattcaaagaaaaggaggaaaatcttcatttgttggaaatgaaaacgttctagcaactgtataaaagcgttgggcatgtttgttatttctatactcactctgtcatgaagaagggtctcagccttttgtggagcattgagggagttgcttcttaggcctcaggtgctgtattgggggagaagggagaaagcatatgcaatgaattgtaaagatctctgctgtgcaggtgctaagattaaacactaaaaagaaagagagatatatgtaatgtacaactgacactgccatttttcctttttggaggaaatggacatagataaagaagatatttcttcggttaagattt

SEQ ID NO: 428 - protein, 761 aa, Homo sapiens
MNWRFVELLYFLFIWGRISVQPSHQEPAGTDQHVSKEFDWLISDRGPFHHSRSYLSFVERHRQGFTTRYKIYREFARWKVRNTAIERRDLVRHPVPLMPEFQRSIRLLGRRPTTQQFIDTIIKKYGTHLLISATLGGEEALTMYMDKSRLDRKSGNATQSVEALHQLASSYFVDRDGTMRRLHEIQISTGAIKVTETRTGPLGCNSYDNLDSVSSVLLQSTESKLHLQGLQIIFPQYLQEKFVQSALSYIMCNGEGEYLCQNSQCRCQCAEEFPQCNCPITDIQIMEYTLANMAKSWAEAYKDLENSDEFKSFMKRLPSNHFLTIGSIHQHWGNDWDLQNRYKLLQSATEAQRQKIQRTARKLFGLSVRCRHNPNHQLPRERTIQQWLARVQSLLYCNENGFWGTFLESQRSCVCHGSTTLCQRPIPCVIGGNNSCTMCSLANISLCGSCNKGYKLYRGRCEPQNVDSERSEQFISFETDLDFQDLELKYLLQKMDSRLYVHTTFISNEIRLDTFFDPRWRKRMSLTLKSNKNRMDFIHMVIGMSMRICQMRNSSLDPMFFVYVNPFSGSHSEGWNMPFGEFGYPRWEKIRLQNSQCYNWTLLLGNRWKTFFETVHIYLRSRTRLPTLLRNETGQGPVDLSDPSKRQFYIKISDVQVFGYSLRFNADLLRSAVQQVNQSYTQGGQFYSSSSVMLLLLDIRDRINRLAPPVAPGKPQLDLFSCMLKHRLKLTNSEIIRVNHALDLYNTEILKQSDQMTAKLC

SEQ ID NO: 429 - DNA, 5601 bp, Homo sapiens
ggcccggctgcgaggaggaggcggcggcggcgcaggaggatgtacttggtggcgggggacagggggttggccggctgcgggcacctcctggtctcgctgctggggctgctgctgctgctggcgcgctccggcacccgggcgctggtctgcctgccctgtgacgagtccaagtgcgaggagcccaggaactgcccggggagcatcgtgcagggcgtctgcggctgctgctacacgtgcgccagccagaggaacgagagctgcggcggcaccttcgggatttacggaacctgcgaccgggggctgcgttgtgtcatccgccccccgctcaatggcgactccctcaccgagtacgaagcgggcgtttgcgaagatgagaactggactgatgaccaactgcttggttttaaaccatgcaatgaaaaccttattgctggctgcaatataatcaatgggaaatgtgaatgtaacaccattcgaacctgcagcaatccctttgagtttccaagtcaggatatgtgcctttcagctttaaagagaattgaagaagagaagccagattgctccaaggcccgctgtgaagtccagttctctccacgttgtcctgaagattctgttctgatcgagggttatgctcctcctggggagtgctgtcccttacccagccgctgcgtgtgcaaccccgcaggctgtctgcgcaaagtctgccagccgggaaacctgaacatactagtgtcaaaagcctcagggaagccgggagagtgctgtgacctctatgagtgcaaaccagttttcggcgtggactgcaggactgtggaatgccctcctgttcagcagaccgcgtgtcccccggacagctatgaaactcaagtcagactaactgcagatggttgctgtactttgccaacaagatgcgagtgtctctctggcttatgtggtttccccgtgtgtgaggtgggatccactccccgcatagtctctcgtggcgatgggacacctggaaagtgctgtgatgtctttgaatgtgttaatgatacaaagccagcctgcgtatttaacaatgtggaatattatgatggagacatgtttcgaatggacaactgtcggttctgtcgatgccaagggggcgttgccatctgcttcactgcccagtgtggtgagataaactgcgagaggtactacgtgcccgaaggagagtgctgcccagtgtgtgaagatccagtgtatccttttaataatcccgctggctgctatgccaatggcctgatccttgcccacggagaccggtggcgggaagacgactgcacattctgccagtgcgtcaacggtgaacgccactgcgttgcgaccgtctgcggacagacctgcacaaaccctgtgaaagtgcctggggagtgttgccctgtgtgcgaagaaccaaccatcatcacagttgatccacctgcatgtggggagttatcaaactgcactctgacagggaaggactgcattaatggtttcaaacgcgatcacaatggttgtcggacctgtcagtgcataaacaccgaggaactatgttcagaacgtaaacaaggctgcaccttgaactgtcccttcggtttccttactgatgcccaaaactgtgagatctgtgagtgccgcccaaggcccaagaagtgcagacccataatctgtgacaagtattgtccacttggattgctgaagaataagcacggctgtgacatctgtcgctgtaagaaatgtccagagctctcatgcagtaagatctgccccttgggtttccagcaggacagtcacggctgtcttatctgcaagtgcagagaggcctctgcttcagctgggccacccatcctgtcgggcacttgtctcaccgtggatggtcatcatcataaaaatgaggagagctggcacgatgggtgccgggaatgctactgtctcaatggacgggaaatgtgtgccctgatcacctgcccggtgcctgcctgtggcaaccccaccattcaccctggacagtgctgcccatcatgtgcagatgactttgtggtgcagaagccagagctcagtactccctccatttgccacgcccctggaggagaatactttgtggaaggagaaacgtggaacattgactcctgtactcagtgcacctgccacagcggacgggtgctgtgtgagacagaggtgtgcccaccgctgctctgccagaacccctcacgcacccaggattcctgctgcccacagtgtacagatcaaccttttcggccttccttgtcccgcaataacagcgtacctaattactgcaaaaatgatgaaggggatatattcctggcagctgagtcctggaagcctgacgtttgtaccagctgcatctgcattgatagcgtaattagctgtttctctgagtcctgcccttctgtatcctgtgaaagacctgtcttgagaaaaggccagtgttgtccctactgcatagaagacacaattccaaagaaggtggtgtgccacttcagtgggaaggcctatgccgacgaggagcggtgggaccttgacagctgcacccactgctactgcctgcagggccagaccctctgctcgaccgtcagctgcccccctctgccctgtgttgagcccatcaacgtggaaggaagttgctgcccaatgtgtccagaaatgtatgtcccagaaccaaccaatatacccattgagaagacaaaccatcgaggagaggttgacctggaggttcccctgtggcccacgcctagtgaaaatgatatcgtccatctccctagagatatgggtcacctccaggtagattacagagataacaggctgcacccaagtgaagattcttcactggactccattgcctcagttgtggttcccataattatatgcctctctattataatagcattcctattcatcaatcagaagaaacagtggataccactgctttgctggtatcgaacaccaactaagccttcttccttaaataatcagctagtatctgtggactgcaagaaaggaaccagagtccaggtggacagttcccagagaatgctaagaattgcagaaccagatgcaagattcagtggcttctacagcatgcaaaaacagaaccatctacaggcagacaatttctaccaaacagtgtgaagaaaggcaactaggatgaggtttcaaaagacggaagacgactaaatctgctctaaaaagtaaactagaatttgtgcacttgcttagtggattgtattggattgtgacttgatgtacagcgctaagaccttactgggatgggctctgtctacagcaatgtgcagaacaagcattcccacttttcctcaagataactgaccaagtgttttcttagaaccaaagtttttaaagttgctaagatatatttgcctgtaagatagctgtagagatatttggggtggggacagtgagtttggatggggaaatgggtgggagggtggtgttgggaagaaaaattggtcagcttggctcggggagaaacctggtaacataaaagcagttcagtggcccagaggttatttttttcctattgctctgaagactgcactggttgctgcaaagctcaggcctgaatgagcaggaaacaaaaaaggccttgcgacccagctgccataaccaccttagaactaccagacgagcacatcagaaccctttgacagccatcccaggtctaaagccacaagtttcttttctatacagtcacaactgcagtaggcagtgaggaagccagagaaatgcgatagcggcatttctctaaagcgggttattaaggatatatacagttacactttttgctgcttttattttcttccaagccaatcaatcagccagttcctagcagagtcagcacatgaacaagatctaagtcatttcttgatgtgagcactggagcttttttttttttacaacgtgacaggaagaggagggagagggtgacgaacaccaggcatttccaggggctatatttcactgtttgttgttgctttgttctgttatattgttggttgttcatagtttttgttgaagctctagcttaagaagaaactttttttaaaaagactgtttggggattctttttccttattatatactgattctacaaaatagaaactacttcattttaattgtatattattcaagcacctttgttgaagctcaaaaaaaatgatgcctctttaaactttagcaattataggagtatttatgtaactatcttatgcttcaaaaaacaaaagtatttgtgtgcatgtgtatataatatatatatatacatatatatttatacacatacaatttatgttttcctgttgaatgtatttttatgagattttaaccagaacaaaggcagataaacaggcattccatagcagtgcttttgatcacttacaaattttttgaataacacaaaatctcattctacctgcagtttaattggaaagatgtgtgtgtgagagtatgtatgtgtgtgtgtgtgtgtgtgtgtgtgcgcgcgcacgcacgccttgagcagtcagcattgcacctgctatggagaagggtattcctttattaaaatcttcctcatttggatttgctttcagttggttttcaatttgctcactggccagagacattgatggcagttcttatctgcatcactaatcagctcctggattttttttttttttttttcaaacaatggtttgaaacaactactggaatattgtccacaataagctggaagtttgttgtagtatgcctcaaatataactgactgtatactatagtggtaacttttcaaacagcccttagcacttttatactaattaacccatttgtgcattgagttttcttttaaaaatgcttgttgtgaaagacacagatacccagtatgcttaacgtgaaaagaaaatgtgttctgttttgtaaaggaactttcaagtattgttgtaaatacttggacagaggttgctgaactttaaaaaaaattaatttattattataatgacctaatttattaatctgaagattaaccatttttttgtcttagaatatcaaaaagaaaaagaaaaaggtgttctagctgtttgcatcaaaggaaaaaaagatttattatcaaggggcaatatttttatcttttccaaaataaatttgttaatgatacattacaaaaatagattgacatcagcctgattagtataaattttgttggtaattaatccattcctggcataaaaagtctttatcaaaaaaaattgtagatgcttgctttttgttttttcaatcatggccatattatgaaaatactaacaggatataggacaaggtgtaaatttttttattattattttaaagatatgatttatcctgagtgctgtatctattactcttttactttggttcctgttgtgctcttgtaaaagaaaaatataatttcctgaagaataaaatagatatatggcacttggagtgcatcatagttctacagtttgtttttgttttcttcaaaaaagctgtaagagaattatctgcaacttgattcttggcaggaaataaacattttgagttgaaatcaaaaaaaaaaaaaaaaaa

SEQ ID NO: 430 - protein, 1036 aa, Homo sapiens
MYLVAGDRGLAGCGHLLVSLLGLLLLLARSGTRALVCLPCDESKCEEPRNCPGSIVQGVCGCCYTCASQRNESCGGTFGIYGTCDRGLRCVIRPPLNGDSLTEYEAGVCEDENWTDDQLLGFKPCNENLIAGCNIINGKCECNTIRTCSNPFEFPSQDMCLSALKRIEEEKPDCSKARCEVQFSPRCPEDSVLIEGYAPPGECCPLPSRCVCNPAGCLRKVCQPGNLNILVSKASGKPGECCDLYECKPVFGVDCRTVECPPVQQTACPPDSYETQVRLTADGCCTLPTRCECLSGLCGFPVCEVGSTPRIVSRGDGTPGKCCDVFECVNDTKPACVFNNVEYYDGDMFRMDNCRFCRCQGGVAICFTAQCGEINCERYYVPEGECCPVCEDPVYPFNNPAGCYANGLILAHGDRWREDDCTFCQCVNGERHCVATVCGQTCTNPVKVPGECCPVCEEPTIITVDPPACGELSNCTLTGKDCINGFKRDHNGCRTCQCINTEELCSERKQGCTLNCPFGFLTDAQNCEICECRPRPKKCRPIICDKYCPLGLLKNKHGCDICRCKKCPELSCSKICPLGFQQDSHGCLICKCREASASAGPPILSGTCLTVDGHHHKNEESWHDGCRECYCLNGREMCALITCPVPACGNPTIHPGQCCPSCADDFVVQKPELSTPSICHAPGGEYFVEGETWNIDSCTQCTCHSGRVLCETEVCPPLLCQNPSRTQDSCCPQCTDQPFRPSLSRNNSVPNYCKNDEGDIFLAAESWKPDVCTSCICIDSVISCFSESCPSVSCERPVLRKGQCCPYCIEDTIPKKVVCHFSGKAYADEERWDLDSCTHCYCLQGQTLCSTVSCPPLPCVEPINVEGSCCPMCPEMYVPEPTNIPIEKTNHRGEVDLEVPLWPTPSENDIVHLPRDMGHLQVDYRDNRLHPSEDSSLDSIASVVVPIIICLSIIIAFLFINQKKQWIPLLCWYRTPTKPSSLNNQLVSVDCKKGTRVQVDSSQRMLRIAEPDARFSGFYSMQKQNHLQADNFYQTV

SEQ ID NO: 431 - DNA, 2270 bp, Homo sapiens
ggcacgagggagagagagagagaactagtctcgagttttttttttttttttttaatctgggaaaccggctccattctgggtctgagttaggagcttggggctgtagtggggagctaggagtcccattggaaggggcctgcagcgacaggctgtggatgcgcacaggctggcccatgcggcccgtgcagcaggcgccacataagccagatgtcagcggccgagagcccgtgcactacaaccagctcacggtaaaagcaggggtcgaaggtgctcaaatgcggcgcggctgaaggctgggggatgccaaaggtgcggaaggcagggtgaggctcgggcgtgagccgcaggcgctgcagacacatgcccagaaagacgtcgtcgatggggaagagctcgacctgcgcacaggcgccagccaggcggtgcagcgtggccccggaaagcacaaagccaccgccgcccgcgtaggccggataggcgggcaggccgtacacggcctcggggatgtagtacttgctagcccgcgtgcggatgggccgcgcatgcacaattacgtcaccagcaagcaggtcttgcgccgggtcccgcggcgccaggaactccaggagatttcccacgttcacgaacacatctgcgtcgcccttaaaaacgaagcgcacgtcggggcagaaagctgaggcccaggctagaaagtggatctccttgagcgttaggttaaaaaaggtgtcgtcgaaggcccagagcaggatgtccgcatacgcaaggctctcggcccgcagcagggcgcgccagtgggttcgcgcgccctccccaacttcgtcggccccgcccgagcctgcgcccctgggcacgcccagcaagaacacgcggcgcaccagcgccccctgcacgcgaccctccgcgccccacgtctggcgcacggcttggcgccgctcgaagtcctctgccaccgacttgacagcaataagcaggtccgggcggccaccgggtgcgccgtcgccgcggcacttgtgcggctggttaatgagcagtggaaaccgccgctggtccttggcgcgcaaatagcgggcgaagtcaaagggtcccgtaggcgtgggcggcgccggtgtgtccccttcgtaggccggcggggctgcacccgcgtcgggtaactggaacgcgcggggtccgggggtgggcctcggtgccgccctccctcgccctcgcggcgcgctcgccgtcggggccgcgccgtcgcgctgcgcatagagtaagaggcccagggaggcgccaaggagcagcgtgagcaatgcgtccctgcgtaggcgcagcctcctcctcatctccgcgcggcctgcgccctccctcccctgtaagggtcgcagtcggcagcagggggcagcgagccccgccctccccagctgagggggcgggaggccacgccccggggggggctccagcgaccgacggttgagccccttgcgttgttctcctcctcccggccgtgtcgcaccgccgggaccggcagcctgaagggacaagaagttcacccatgtagccaactcccccgcggcctcagctccggcccaggactgcgacccagggccgggcagggagactgggagcctcggcccctcccccgcccgcctccctcgcgctgaggccgaatcccttccaccctgccatcccctcaatgtcgggccctggggtcccgacactcacgctcggccctcggaagtggcgcagccccggacgccctggcctccggggctcagcgcagggtccgaggggccgccatggaccgggcccgagccaaatgcagaagactccacaggcaaatactggacggtgggcagtgactccgcggtcaccagcagcggcgacactcctgtggacttcttcttcgagttctgcgactataacaaggtggccatcaaggtgggcgggcgctacctgaagggcgaccacgcaggcgtcctgaaggcctcggcggaaaccgtggaccccgcctcgctctgggagtactagggccggcccgtccttccccgcccctgcccacatggcggctcctgccaaccccccctgctgccagcctcccccgtccccaacatgcatctcactctgggtgtcttggtcttttattttttgtaagtgtcatttgtataactctaaacgcccatgatagtagcttcaaactggaaatagcgaaataaaataactcagtctgcaaaaaaaaaaaaaaaaaaaaaaaaaaaaaaaaaaaaaaaaaaaaaaaaaaaaaaaaaaaaaaa

SEQ ID NO: 432 - protein, 177 aa, Homo sapiens
MGRACTITSPASRSCAGSRGARNSRRFPTFTNTSASPLKTKRTSGQKAEAQARKWISLSVRLKKVSSKAQSRMSAYARLSARSRARQWVRAPSPTSSAPPEPAPLGTPSKNTRRTSAPCTRPSAPHVWRTAWRRSKSSATDLTAISRSGRPPGAPSPRHLCGWLMSSGNRRWSLARK

SEQ ID NO: 433 - DNA, 2485 bp, Homo sapiens
ggcaaatgggcttgggcggctcctcggcgggtggcggtggtggccgtagcggttcctcctggccctgttaatgtcggggccaggccgggggaggatggcgccctagaacccggccttgctggggtaggggcgggaggggacggggtggggaccggccatgtcggaggtgacccggagtctgctgcagcgctggggcgccagttttaggagaggcgccgacttcgactcttggggccagctggtggaggcgatagacgagtatcagatattagcaagacatctacaaaaggaggcccaagctcaacacaataattctgaattcacagaagaacaaaagaaaaccataggcaaaattgcaacatgcttggaattgcgaagtgcagctttacagtccacacagtctcaagaagaatttaaactggaggacctgaagaagctagaaccaatcctaaagaatattcttacatataataaagaattcccatttgatgttcagcctgtcccattaagaagaattttggcacctggtgaagaagagaatttgggatttgaagaagatgaagaagagggtggtgctggagcagggtctcctgattcttttcctgctagagttcccggtactttattaccaaggttgccatcggaaccaggaatgacattactcactatcagaattgagaaaattggtttgaaagatgctgggcagtgcatcgatccctatattacagttagtgtaaaggatctgaatggcatagacttaactcctgtgcaagatactcctgtggcttcaagaaaagaagatacatatgttcattttaatgtggacattgagctccagaagcatgttgaaaaattaaccaaaggtgcagctatcttctttgaattcaaacactacaagcctaaaaaaaggtttaccagcaccaagtgttttgctttcatggagatggatgaaattaaacctgggccaattgtaatagaactatacaagaaacccactgactttaaaagaaagaaattgcaattattgaccaagaaaccactttatcttcatctacatcaaactttgcacaaggaatgatcctgacatgatgaacctggaacttctgtgaattttaccactcagtagaaaccatcatagctctgtgtagcatattcacccttcaacaggcaggaagcaagccgtacccagaccagtaggccggacggagtccaatgcaaagctgtaccacagaattcagagtccagcacatcacactgacgtataggactccttgggatacaggtttattgtagattttgaaacatgtttttacttttctattaattgtgcaattaatagtctattttctaatttaccactactcctaccctgcttcctggaacaatactgttgtgggtaggatgtgctcatcttcagacttaatacagcaataagaatgtgctagagtttacacatctgttcacttttgctccaatatgctcttttgacttaacgtcaagctttgggttgatgtgggtagggtagtgtcaaactgctttgagaggaatgggaccagttctgctgcctaagaaggtctgtctggatgtttataggcagcacctctgaagtggcctaaattcaccctgatctgatagttttcctgcttagaaagtgtgccttggccagatcagtatcccacatgggagtgttccctaggttgtagctgtgattgtttccagatgaccagattgtttttctgaaaatgagcatatttttagtcatgtcgattagctgttcttctacatcacattgttactctttctgatgatgattctagggttaacattggaaccatctcaaaataattacaaagttttagatgggtttacaatgtcttctaaacaatgtaatctaaaaataattgagtcagatgctaacgagatactgcaggcataactgctgtttttctgacaactgattgtgaaaccttaaaacctgcatacctcttcttacagtgaggagtatgcaaaatctggaaagatattctattttttttatataggtagataggatcgccatttatttcctatttagatatactgacattcatccatatgaaaatatgcaggtcattagcttactataatttacttttgacttaatggggcataaataaaactttcatagtacacatgaggtggatatttgatacacagaacatttgcggtgggctttctgtgggttagatgtaaagcccacatattttaatattcactattttaaatgagcaatgcatgaggggaatgcagtgtcagtacctggcctatttttaaactagtgtaatcaccctagtcataccattcagtatgtttgctttttaaaataagtaaccacaattaagttgttgtagcccttgcacttcaagagatctagtctttactttcagttgtctgttaggtccattctgtttactagacggatgttaataaaaactatgcgagcctg

SEQ ID NO: 434 - protein, 306 aa, Homo sapiens
MSEVTRSLLQRWGASFRRGADFDSWGQLVEAIDEYQILARHLQKEAQAQHNNSEFTEEQKKTIGKIATCLELRSAALQSTQSQEEFKLEDLKKLEPILKNILTYNKEFPFDVQPVPLRRILAPGEEENLGFEEDEEEGGAGAGSPDSFPARVPGTLLPRLPSEPGMTLLTIRIEKIGLKDAGQCIDPYITVSVKDLNGIDLTPVQDTPVASRKEDTYVHFNVDIELQKHVEKLTKGAAIFFEFKHYKPKKRFTSTKCFAFMEMDEIKPGPIVIELYKKPTDFKRKKLQLLTKKPLYLHLHQTLHKE

SEQ ID NO: 435 - DNA, 1564 bp, Homo sapiens
gaagcacatctggacagctgtgcggcctccttgcgggccgacgtcagccgagcacgtcccccacgtcctctccttctcgccacttattatttattcgttttcccaaagaagcgactagggacccaagtttaaaaattcctccccccactcaatgcgagacgtggccagatcccatccaacacacggtttaattttcatggggctctgggatcaaaagaacagaaacagcaacaacaaaagcccagccgctgtctgattttaagctggcaaagtgggaaaaataaagtgttgagtaaacagaccaagttggatcatggggaatttcagaggtcatgccctccctggaaccttcttttttattattggtctttggtggtgtacaaagagtattctgaagtatatctgcaaaaagcaaaagcgaacctgctatcttggttccaaaacattattctatcgattggaaattttggagggaattacaatagttggcatggctttaactggcatggctggggagcagtttattcctggagggccccatctgatgttatatgactataaacaaggtcactggaatcaactcctgggctggcatcatttcaccatgtatttcttctttgggctgttgggtgtggcagatatcttatgtttcaccatcagttcacttcctgtgtccttaaccaagttaatgttgtcaaatgccttatttgtggaggcctttatcttctacaaccacactcatggccgggaaatgctggacatctttgtgcaccagctgctggttttggtcgtctttctgacaggcctcgttgccttcctagagttccttgttcggaacaatgtacttctggagctattgcggtcaagtctcattctgcttcaggggagctggttctttcagattggatttgtcctgtatccccccagtggaggtcctgcatgggatctgatggatcatgaaaatattttgtttctcaccatatgcttttgttggcattatgcagtaaccattgtcatcgttggaatgaattatgctttcattacctggttggttaaatctagacttaagaggctctgctcctcagaagttggacttctgaaaaatgctgaacgagaacaagaatcagaagaagaaatgtgactttgatgagcttccagtttttctagataaaccttttcttttttacattgttcttggttttgtttctcgatcttttgtttggagaacagctggctaaggatgactctaagtgtactgtttgcatttccaatttggttaaagtatttgaatttaaatattttctttttagctttgaaaatattttgggtgatactttcattttgcacatcatgcacatcatggtattcaggggctagagtgatttttttccagattatctaaagttggatgcccacactatgaaagaaatatttgttttatttgccttatagatatgctcaaggttactgggcttgctactatttgtaactccttgaccatggaattatacttgtttatcttgttgctgcaatgagaaataaatgaatgtatgtattttggtgc

SEQ ID NO: 436 - protein, 275 aa, Homo sapiens
MGNFRGHALPGTFFFIIGLWWCTKSILKYICKKQKRTCYLGSKTLFYRLEILEGITIVGMALTGMAGEQFIPGGPHLMLYDYKQGHWNQLLGWHHFTMYFFFGLLGVADILCFTISSLPVSLTKLMLSNALFVEAFIFYNHTHGREMLDIFVHQLLVLVVFLTGLVAFLEFLVRNNVLLELLRSSLILLQGSWFFQIGFVLYPPSGGPAWDLMDHENILFLTICFCWHYAVTIVIVGMNYAFITWLVKSRLKRLCSSEVGLLKNAEREQESEEEM

SEQ ID NO: 437 - DNA, 1971 bp, Homo sapiens
aggataggaactggagttattgttaatgttacaggaagaacacattctcaaaggagaggggggtggtgggaaactttgattttcatagggttttcagtttcctctcaaatgggaggatgcagcagtgccgctacttaactgaacgtctcgacagtctgatggggcggccctcagccttccggagcagcagtgggactgacctgtccagtgaggaagaaacactgaaccagatggaatggcctttggggatggaaaaaccccagtttacgctcatctcttctctcagctaacttttgtggagccctgttcccaaactggcctgggccagagcaccgtggaggggtatttgttgtaaatggaaggtttcgaggcccgcctggaaatcctgaagggtgagacctgcagtgggctcaggagtctgcatttgtgggtgaccgagggggcctcccctccctctagagtccacactgtggagagcatcaggaagggaaaggcctgcatcttgtgctcagtgagctcatcgtctagtgaggaaggcatgtgtgaatctctggacaaggcagcgctgagctgttgtggactagtggtgcaggcaagggattacttctgaccaaggatggtgagaaggtttcccatacagactgacgtctggattgagctttgaagaagaaagccaggactggagcagacgacgaggagggaagagtttgaccagatataccatctggcatctccagcctcccctccaaattacatgtataatcctatcaagacattaaagaccaatacgattgggacattaaacatgttggggctggcaaaacgagtcggtgcccgtctgctcctggcctccacatcggaggtgtatggagatcctgaagtccaccctcaaagtgaggattactggggccacgtgaatccaataggacctcgggcctgctacgatgaaggcaaacgtgttgcagagaccatgtgctatgcctacatgaagcaggaaggcgtggaagtgcgagtggccagaatcttcaacacctttgggccacgcatgcacatgaacgatgggcgagtagtcagcaacttcatcctgcaggcgctccagggggagccactcacggtatacggatccgggtctcagacaagggcgttccagtacgtcagcgatctagtgaatggcctcgtggctctcatgaacagcaacgtcagcagcccggtcaacctggggaacccagaagaacacacaatcctagaatttgctcagttaattaaaaaccttgttggtagcggaagtgaaattcagtttctctccgaagcccaggatgacccacagaaaagaaaaccagacatcaaaaaagcaaagctgatgctggggtgggagcccgtggtcccgctggaggaaggtttaaacaaagcaattcactacttccgtaaagaactcgagtaccaggcaaataatcagtacatccccaaaccaaagcctgccagaataaagaaaggacggactcgccacagctgaactcctcacttttaggacacaagactaccattgtacacttgatgggatgtatttttggcttttttttgttgtcgtttaaagaaagactttaacaggtgtcatgaagaacaaactggaatttcattctgaagcttgctttaatgaaatggatgtgcctaaaagctcccctcaaaaaactgcagattttgccttgcactttttgaatctctctttttatgtaaaatagcgtagatgcatctctgcgtattttcaagtttttttatcttgctgtgagagcatatgttgtgactgtcgttgacagttttatttactggtttctttgtgaagctgaaaaggaacattaagcgggacaaaaaatgccgattttatttataaaagtgggtacttaataaatgagtcgttatactatgaaaaaaaaaaaaaaaaaaaaaaaaaaaaaaaaaaaaaaaaaaaaaaaa

SEQ ID NO: 438 - protein, 252 aa, Homo sapiens
MYNPIKTLKTNTIGTLNMLGLAKRVGARLLLASTSEVYGDPEVHPQSEDYWGHVNPIGPRACYDEGKRVAETMCYAYMKQEGVEVRVARIFNTFGPRMHMNDGRVVSNFILQALQGEPLTVYGSGSQTRAFQYVSDLVNGLVALMNSNVSSPVNLGNPEEHTILEFAQLIKNLVGSGSEIQFLSEAQDDPQKRKPDIKKAKLMLGWEPVVPLEEGLNKAIHYFRKELEYQANNQYIPKPKPARIKKGRTRHS

SEQ ID NO: 439 - DNA, 2643 bp, Homo sapiens
gctactcccacctgccacgccgcaagagaatgtctgtggcccacatgagcttgcaagctgccgctgccctcctcaaggggcgctcggtgctggatgccaccggacagcggtgccgggtggtcaagcgcagctttgccttcccgagcttcctggaggaggatgtggtcgatggggcagacacgtttgactcctccttttttagtaaggaagaaatgagctccatgcctgatgatgtctttgagtcccccccactctctgccagctacttccgagggatcccacactcagcctcccctgtctcccccgatggggtgcaaatccctctgaaggagtatggccgagccccagtccccgggccccggcgcggcaagcgcatcgcctccaaggtgaagcactttgcctttgatcggaagaagcggcactacggcctcggcgtggtgggcaactggctgaaccgcagctaccgccgcagcatcagcagcactgtgcagcggcagctggagagcttcgacagccaccggccctacttcacctactggctgaccttcgtccatgtcatcatcacgctgctggtgatttgcacgtatggcatcgcacccgtgggctttgcccagcacgtcaccacccagctggtgctgcggaacaaaggtgtgtacgagagcgtgaagtacatccagcaggagaacttctgggttggccccagctcgattgacctgatccacctgggggccaagttctcaccctgcatccggaaggacgggcagatcgagcagctggtgctgcgcgagcgagacctggagcgggactcaggctgctgtgtccagaatgaccactccggatgcatccagacccagcggaaggactgctcggagactttggccacttttgtcaagtggcaggatgacactgggccccccatggacaagtctgatctgggccagaagcggacttcgggggctgtctgccaccaggaccccaggacctgcgaggagccagcctccagcggtgcccacatctggcccgatgacatcactaagtggccgatctgcacagagcaggccaggagcaaccacacaggcttcctgcacatggactgcgagatcaagggccgcccctgctgcatcggcaccaagggcagctgtgagatcaccacccgggaatactgtgagttcatgcacggctatttccatgaggaagcaacactctgctcccaggtgcactgcttggacaaggtgtgtgggctgctgcccttcctcaaccctgaggtcccagatcagttctacaggctctggctgtctctcttcctacatgctggcgtggtgcactgcctcgtgtctgtggtctttcaaatgaccatcctgagggacctggagaagctggccggctggcaccgtatcgccatcatcttcatcctcagtggcatcacaggcaacctcgccagtgccatctttctcccataccgggcagaggtgggcccggccggctcacagttcggcctcctcgcctgcctcttcgtggagctcttccagagctggccgctgctggagaggccctggaaggccttcctcaacctctcggccatcgtgctcttcctgttcatctgtggcctcttgccctggatcgacaacatcgcccacatcttcggcttcctcagtggcctgctgctggccttcgccttcctgccctacatcaccttcggcaccagcgacaagtaccgcaagcgggcactcatcctggtgtcactgctggcctttgccggcctcttcgccgccctcgtgctgtggctgtacatctaccccattaactggccctggatcgagcacctcacctgcttccccttcaccagccgcttctgcgagaagtatgagctggaccaggtgctgcactgaccgctgggccacacggctgcccctcagccctgctggaacagggtctgcctgcgagggctgccctctgcagagcgctctctgtgtgccagagagccagagacccaagacagggcccgggctctggacctgggtgcccccctgccaggcgaggctgactccgcgtgagatggttggttaaggcggggtttttctggggcgtgaggcctgtgagatcctgacccaagctcaggcacacccaaggcacctgcctctctgagtcttgggtctcagttcctaatatcccgctccttgctgagaccatctcctggggcagggtccttttcttcccaggtcctcagcgctgcctctgctggtgccttctcccccactactactggagcgtgcccttgctggggacgtggctgtgccctcagttgcccccagggctgggtgcccaccatgccccttcctctttctcctcctacctctgccctgtgagcccatccataaggctctcagatgggacattgtaggaaaggctttggccatggtctgggggcagagaacaaggggggagacacaagtagacctcaggtagaacgacaccgggcggagccaccccagggcctgctcccagggagtgctcgaggcgcatcaggcccgttttttaccagtttatatcacggtcttcatttttaaaagtaacgctaactttgtacggacgatgtctcatggattaaataatattctttatggcaaaaaaaaaaaaaaaaaa

SEQ ID NO: 440 - protein, 619 aa, Homo sapiens
MSVAHMSLQAAAALLKGRSVLDATGQRCRVVKRSFAFPSFLEEDVVDGADTFDSSFFSKEEMSSMPDDVFESPPLSASYFRGIPHSASPVSPDGVQIPLKEYGRAPVPGPRRGKRIASKVKHFAFDRKKRHYGLGVVGNWLNRSYRRSISSTVQRQLESFDSHRPYFTYWLTFVHVIITLLVICTYGIAPVGFAQHVTTQLVLRNKGVYESVKYIQQENFWVGPSSIDLIHLGAKFSPCIRKDGQIEQLVLRERDLERDSGCCVQNDHSGCIQTQRKDCSETLATFVKWQDDTGPPMDKSDLGQKRTSGAVCHQDPRTCEEPASSGAHIWPDDITKWPICTEQARSNHTGFLHMDCEIKGRPCCIGTKGSCEITTREYCEFMHGYFHEEATLCSQVHCLDKVCGLLPFLNPEVPDQFYRLWLSLFLHAGVVHCLVSVVFQMTILRDLEKLAGWHRIAIIFILSGITGNLASAIFLPYRAEVGPAGSQFGLLACLFVELFQSWPLLERPWKAFLNLSAIVLFLFICGLLPWIDNIAHIFGFLSGLLLAFAFLPYITFGTSDKYRKRALILVSLLAFAGLFAALVLWLYIYPINWPWIEHLTCFPFTSRFCEKYELDQVLH

SEQ ID NO: 441 - DNA, 4314 bp, Homo sapiens
gaacagattcatgggtgatttagcctatctgtcccaggccagcgtggctgagtgtgctggctggaggcctctctctctgcttcgagggtagctgagatccaccccggaaaccggcaggatgaagggggcaagtgaggagaagctggcatctgtgtccaacctggtcactgtgtttgagaatagcaggtatgggcagctggggtgggagggtcaccatggtgggctggcagccaccctccagcctttctggcagctctctccctgggccctgccccggaccctcctcctgcaggggcagccccgcgttcctcggtcacggattccttggagcatgggagagtgtcggtgggacaccaggagccaggcaggggtgagagtgccagtgtgtgttgggagagtccagacaggtgtggttacgagcaagcatgggcagaccaaagcctgtgtgtgggcacaggaccccacccagtgcctgccagcacctctcagaaaaggtagctgatactcaccaagaatttacgccctatgattaggataaccatataatttatcattcagcacacaattgaaactgaaagtaaatgccaaataaaatgtggtggttgtgggggaggcattacaggtaaagctgggaccgtatgaggcaaaccaggatgtacgggcagcatcctgatggggtactccctactctaagttcatgtccttacttatttaatttagtcatcgaacagcctaacaggggtagattctgtttctgttcccgtcttatagatgaggaaatggagacacagagaggtgaggatgccaagtgctttaagtatctggggcaatgctggggcgtctgtctggagggaaaaggctgggccagatgcgtggagtcattggtagccctgggagcatgtgtgtttgtgtgtgtgcgcgtgtgtgtatgtgtgtgttgtgtgttatgtgtggcatcaatccattctgcaggcatttcttaagctcaggactgtgttaggggctgtcccaggtagggttttctggaaatagactcagacagaggtttgcctcaggtgatttatcagggagagcttttgggaacaacagctgtgggtgtgagggaagcagggccgggcagggggagatgctgaactgcagtgcacctgccacagaggcctcagcctgtcccagggagctctggagctgggatgcctctcggttgttccagctgaggaagagggctgggtatttgtatctccatgtggactggacaagagactctgggtgaggcagctctctcttccagagagtgattcccagagagggactcagccaataaattacccggcagcccccagtactaccagtagctggtggggatggtgtggggaggcctcattcctgaaggagggacatgggtggcacagcacagcatcctacaggaactgtagaggatgaagaagggtttcagtatttggatgctgagctcatcgaataactatgatgcaaggtcatagacagtagatgtcctaggaatggcccggatgctgtattgagggcactcatggcaggcaatgtttcctgtaggcttcagggtggagatggcatagatgtagacctagaagtcttcaacttcctgagctgggtgattctcccctgcctctcccgggatctttgccaagctcgtcctgttcagcaccaaagacagctcttgggtgccgccttcctggcccaccacccccttgggtgtgggtggatggtaccacctcactcaacatgcttgacgtggactaggcacacctgggtggagcccctcagcatgctgtgctctgcccaggcaataaccctggcaggagtgggcagcccttagacgggagttaggtcccagcaggcatcaagagggtgagagccactccttactgagtgaggggacccataccaactgccttggcctgggcttccttatgaggtctccagcacctcagctgatctgaaactgaggggcaaagaggaaacagaagctggccaggggccctagaacagaaatgcagaacctgaaaccaaatgtagaacagaaagcctgagaaccagctacgcccatgagctgcagacccatgggctgagaaaccagggactggggtgccagggaggggtgggagagcctgggagtagccacacagcactaggtcccaatgctttcgctgccacaaacccaattgtgtcacttggggcaagtcactttgactccgcggacctgtttctcctttactcaaatggggaggggcaggttagagtgaaggctcaggaagcagtcgcctgatttgaatcccacctctgccacttccgagccgcatgttactcatcctgtccagacctcagtttccttgagtgcaaaatatgggtaatgaaaacctttctcacggagttttggagatttcgtatttgtttggccttccatttcctggcctgtctttctcataaggatgcctgccctgttctgtcatcacaagcccttccacaccaagggcaacgttgggtgtattcatcaagggtgggccctgttgtctaaggaatttgactggcttgcagaacccagtacacagggtaataaaggtgacctacgaaggcccgtccctgggagaacagagcatctgctgctgggctggctctccctgcttctggacgtgtggaggatgtcgatcccattgagaagccccagcttttgcaggcctgctctcactttatattgttctgtggctcctaccttcccttgatgtataggttactgatgtggaaactgaaaacagaggtgaggtccaaaggtgaggataatccagggggtaccactcaaaaacccctatatacagaaaggattcctggacactgtggcttcattttaaacaaggaagtatgcagttccccagaaaataaaatatagtccaccctgactcattttgaacactgagttccctccaagaatgtgttgggagagaagtgaaagtcttactcagcatgttcccaaagaaagccaggcacccaggggcccctgcactggggatttgcaccaggcaacccaaatccacaccagggacttgctgctgttttccctgttctccagggaggaagccctcaggtctgtctcttctcctcaggaccccagaagcagcacccagaggccagaggctagaggacgtgcatcaccgccctgagtgcaggcctcccgagtccccaggaccacgggagaagacgaatgtcggggaggccgtggggtctgagcccaggacagtcagcaggaggtacctgaactccctgaagaacaagctgtccagcgaagcctggaggaaatcttgccagcctgtgaccctctcaggatcggggacgcaggtgcctgagggctgaggtagaggtgtggggtgctggggtggggagctctccctgacctcacctccacacatgctttcctagccagagccagcagttccccaggtgggggtatggtgtgatcagaggtcagctgggagctagatttccccatgcttaatggcctttgattcactaactgcctgctacgcaccgtgctggattacttcgcgagtccctcgtgtaggagttttttggacaaggaagttgaaacacagttttaaggaacttattcaaggccacacagcttggaacagtctccatcttgtgaacctaatactcttctcaggtggggcctcagtttacccactggaggagacaacaatctcaacctagaaatagaggtctgagtgtgaactgtcctgcccttagactaaagcccagtctgatctcttctgtggcttgcagttttctcatctgcagagttcaagggttggcatgcagatactgtgcacccaaattccctggagtcacatcccagcacgtctgcttactaactgtgtgtccttgggcaagtcacttgagtctctttgtgccagtttcctcatttgtaaaatggggatagtggttatagtaatgcgtcctggttttcaatcgctgctgaacaaacctatcaaaaatgtagcggctggccgggtgcagtaactcacgcctgtaatcccagcactttgggaggccgaggtgggcagatcacctgaggtcaggagttcaagaccagcctggccaacatagggaaacactgtctcaactaaaaatacaaaaattagttgggcatggtggtgggcgcctgtaatcccagctactcagtaggctgagacaggagaatcacttgaatccaggaggaggaggttgcagtgagccgagattgcgccactccactctagcctgggtgacagagcgagactctgtctc

SEQ ID NO: 442 - protein, 146 aa, Homo sapiens
TLSSLQECVGREVKVLLSMFPKKARHPGAPALGICTRQPKSTPGTCCCFPCSPGRKPSGLSLLLRTPEAAPRGQRLEDVHHRPECRPPESPGPREKTNVGEAVGSEPRTVSRRYLNSLKNKLSSEAWRKSCQPVTLSGSGTQVPEG

SEQ ID NO: 443 - DNA, 3689 bp, Homo sapiens
ggcacgaggctagtctcgagttttttttttttttttttcagggtagtttgtagatagatttctcatagatttatttctgcgtcatattatatatagatatatgcatatatacctttttttttttaatacaatctatatacccttcccttccccaccaaactcacaaaaggagattaaacccttccaggattgccatcaagcttcccgagatggccagggccaagaaagaatcatctctcaacatgttaagaaacggctgccattcttaggctctggggttgaagcagcagcattcccaggacccaagggccagagagaggaaaagaaatgactgtagtgtgacaggattctaggatgaacatgtccagtgactcctggcatggcagactggctcccagaattctcagggtgtgagtaaaggtgggggccctatggctcttcagaggctgctcaataggtcaggggtagggtataggaactggggatcaggcatgcagggatggggtggcagaaaaaacgcctgtgggttatgctccagacagagcgacccccatcagggctacccacctactcaatgacatgtaatgaacagggacagatgctgagctcttaaggaaacaagggagagagcatggcagcggggagcaatggaacacatgaagtcacaaaaaacagaaagtaccaacaaaaacatgacctacatttgactcctccctagagaaggtgtgatctatgtttggggttaggggaggtgaagggtcatgaacctaggattatcagctggccaggggcacagaaggctctctgaggactcctaagaggcaggcaggcagctgggaccccacatccccagggaggaaacgacagttctttcaattcgacttggaccaaatcttggcgctccctcggagccccttgccctttgaggctttcttgctgggctggcgctggttggtgccaggagctggttccctcagctcagtcaggtgttgctcagggtcctgagatgtggctgcggctgctgctgccgtcgtaactttaatggtttttttaaggttggcaacctcactctcaatctgctgcttcaggcccagctgctgctccttgtgttggttggcacggctcacctgctcctcaatgcctgacagcacgacctcacagcccacacaccattcctgcagggttcgggcaatggcactgaggtcctggcgctggatgtcccgcccgatgctgtagtcaacctcgagccgctggttgcgctggtccagggagccacgaagcacgtcagcatacacagcctcaatcacaaggtcttccagctgccgcacattacgcagggcaagagcctccagcaacactgcatatgggatacactttactttagcagccagggtgacaactgagaggtgtcgaagcttattcttctgagcctctgttagtggaggaagattccgggcttcagctaagtagtcagcgtatgtcccataagcaaacactgtgagcagccggaaggtagaggcaaagtcactctcagccagctctctaacattgggcatgtccagcagttctccaaacacgtagacaccaggggcctccagcacctgatggatgagtgtggccagcgctgcccccttggccgacttggctaggagcagaaattgctcctggttctgccctgtcaccttcacttccgcactcatcactgcactgagtgtgggggacttgggctcaggatgtccagagcctgggtcaggctctgcgggccgctacctggaagcttcgacctccagcgcaccgggcggggccgccgctccgtcacctccggcagctgttccaagcctttcctgccacctccctgaagagtcgccgagcgggtgcgggtgcgggcgcatcggccatcaccgcgcggccgcgcagcggacaccgtgcgtaccggcctgcggcgcccggccaccggggcggaccgcggaacccgaggccatgtcccatgaaaagagttttttggtgtctggggacaactatcctccccccaaccctggatatccgggggggccccagccacccatgcccccctatgctcagcctccctaccctggggccccttacccacagccccctttccagccctccccctacggtcagccagggtacccccatggccccagcccctacccccaagggggctacccacagggtccctacccccaagggggctacccacagggcccctacccacaagagggctacccacagggcccctacccccaagggggctacccccaggggccatatccccagagccccttcccccccaacccctatggacagccacaggtcttcccaggacaagaccctgactcaccccagcatggaaactaccaggaggagggtcccccatcctactatgacaaccaggacttccctgccaccaactgggatgacaagagcatccgacaggccttcatccgcaaggtgttcctagtgctgaccttgcagctgtcggtgaccctgtccacggtgtctgtgttcacttttgttgcggaggtgaagggctttgtccgggagaatgtctggacctactatgtctcctatgctgtcttcttcatctctctcatcgtcctcagctgttgtggggacttccggcgaaagcacccctggaaccttgttgcactgtcggtcctgaccgccagcctgtcgtacatggtggggatgatcgccagcttctacaacaccgaggcagtcatcatggccgtgggcatcaccacagccgtctgcttcaccgtcgtcatcttctccatgcagacccgctacgacttcacctcatgcatgggcgtgctcctggtgagcatggtggtgctcttcatcttcgccattctctgcatcttcatccggaaccgcatcctggagatcgtgtacgcctcactgggcgctctgctcttcacctgcttcctcgcagtggacacccagctgctgctggggaacaagcagctgtccctgagcccagaagagtatgtgtttgctgcgctgaacctgtacacagacatcatcaacatcttcctgtacatcctcaccatcattggccgcgccaaggagtagccgagctccagctcgctgtgcccgctcaggtggcacggctggcctggaccctgcccctggcacggcagtgccagctgtacttcccctctctcttgtccccaggcacagcctagggaaaaggatgcctctctccaaccctcctgtatgtacactgcagatacttccatttggacccgctgtggccacagcatggcccctttagtcctcccgcccccgccaaggggcaccaaggccacgtttccgtgccacctcctgtctactcattgttgcatgagccctgtctgccagcccaccccagggactgggggcagcaccaggtcccggggagagggattgagccaagaggtgagggtgcacgtcttccctcctgtcccagctccccagcctggcgtagagcacccctcccctcccccccacccccctggagtgctgccctctggggacatgcggagtgggggtcttatccctgtgctgagccctgagggcagagaggatggcatgtttcaggggagggggaagccttcctctcaatttgttgtcagtgaaattccaataaatgggatttgctctctgaaaaaaaaaaaaaaaaaaaa

SEQ ID NO: 444 - DNA, 729 bp, Homo sapiens
cggacgcgtgggcggaacacgctgggaggagggtggaaggcaacctcggggaaactgggaaaggcggcctggacttcgggaacaccgcgtacctgcgggggcacagccccacccgagcgaacgggctccaaaggggaggtcccgcggtgcgcaccgcgcagagctcagggggtggtgcgcccggcccttctgcggcgcacagcccagcccaggaacgcgggcggtgcggactcagcgggccgggtgcaggcgcggagctgggcctctgcgcccggcccgacctccgtctataaatagagcagccagttgcagggctccattctgctttccaactgcctgactgcttgttcgtctcactggtgtgagctccagcatcccctttgctcgaaatggaccccaactgctcttgcgccactggtggctcctgcacgtgcgccggctcctgcaagtgcaaagagtgcaaatgcacctcctgcaagaagagctgctgttcctgctgccccgtgggctgtgccaagtgtgcccagggctgcgtctgcaaaggggcatcggagaagtgcagctgctgtgcctgatgtgggaacagctcttctcccagatgtaaatagaacaacctgcacaacctggatttttttaaaaatacaacactgagccatttgctgcatttctttttatactaaatatgtgactgacaataaaaacaattttgactttaaaaaaaaaaaaaaa

SEQ ID NO: 445 - protein, 61 aa, Homo sapiens
MDPNCSCATGGSCTCAGSCKCKECKCTSCKKSCCSCCPVGCAKCAQGCVCKGASEKCSCCA

SEQ ID NO: 446 - DNA, 3259 bp, Homo sapiens
ggatgcttattatagatcgacgcgacaccagcgcccggtgccaggttctcccctgaggcttttcggagcgagctcctcaaatcgcatccagagtaagtgtccccgccccacagcagccgcagcctagatcccagggacagactctcctcaactcggctgtgacccagaatgctccgatacagggggtctggatccctactctgcgggccatttctccagagcgactttgctcttctgtcctccccacactcaccgctgcatctccctcaccaaaagcgagaagtcggagcgacaacagctctttctgcccaagccccagtcagctggtgagctccccgtggtctccagatgcagcacatggactctgggccccgcgccggctctgggtgcatgtgcgtgtgcgtgtgtttgctgcgtggtgtcgatggagataaggtggatccgtttgaggaaccaaatcattagttctctatttagatctccattctccccaaagaaaggccctcacttcccactcgtttattccagcccgggggctcagttttcccacacctaactgaaagcccgaagcctctagaatgccacccgcaccccgagggtcaccaacgctccctgaaataacctgttgcatgagagcagaggggagatagagagagcttaattataggtacccgcgtgcagctaaaaggagggccagagatagtagcgagggggacgaggagccacgggccacctgtgccgggaccccgcgctgtggtactgcggtgcaggcgggagcagcttttctgtctctcactgactcactctctctctctctccctctctctctctctcattctctctcttttctcctcctctcctggaagttttcgggtccgagggaaggaggaccctgcgaaagctgcgacgactatcttcccctggggccatggactcggacgccagcctggtgtccagccgcccgtcgtcgccagagcccgatgacctttttctgccggcccggagtaagggcagcagcggcagcgccttcactgggggcaccgtgtcctcgtccaccccgagtgactgcccgccggagctgagcgccgagctgcgcggcgctatgggctctgcgggcgcgcatcctggggacaagctaggaggcagtggcttcaagtcatcctcgtccagcacctcgtcgtctacgtcgtcggcggctgcgtcgtccaccaagaaggacaagaagcaaatgacagagccggagctgcagcagctgcgtctcaagatcaacagccgcgagcgcaagcgcatgcacgacctcaacatcgccatggatggcctccgcgaggtcatgccgtacgcacacggcccttcggtgcgcaagctttccaagatcgccacgctgctgctggcgcgcaactacatcctcatgctcaccaactcgctggaggagatgaagcgactggtgagcgagatctacgggggccaccacgctggcttccacccgtcggcctgcggcggcctggcgcactccgcgcccctgcccgccgccaccgcgcacccggcagcagcagcgcacgccgcacatcaccccgcggtgcaccaccccatcctgccgcccgccgccgcagcggctgctgccgccgctgcagccgcggctgtgtccagcgcctctctgcccggatccgggctgccgtcggtcggctccatccgtccaccgcacggcctactcaagtctccgtctgctgccgcggccgccccgctggggggcgggggcggcggcagtggggcgagcgggggcttccagcactggggcggcatgccctgcccctgcagcatgtgccaggtgccgccgccgcaccaccacgtgtcggctatgggcgccggcagcctgccgcgcctcacctccgacgccaagtgagccgactggcgccggcgcgttctggcgacaggggagccaggggccgcggggaagcgaggactggcctgcgctgggctcgggagctctgtcgcgaggaggggcgcaggaccatggactgggggtggggcatggtggggattccagcatctgcgaacccaagcaatgggggcgcccacagagcagtggggagtgaggggatgttctctccgggacctgatcgagcgctgtctggctttaacctgagctggtccagtagacatcgttttatgaaaaggtaccgctgtgtgcattcctcactagaactcatccgacccccgacccccacctccgggaaaagattctaaaaacttctttccctgagagcgtggcctgacttgcagactcggcttgggcagcacttcggggggggagggggtgttatgggagggggacacattggggccttgctcctcttcctcctttcttggcgggtgggagactccgggtagccgcactgcagaagcaacagcccgaccgcgccctccagggtcgtccctggcccaaggccaggggccacaagttagttggaagccggcgttcggtatcagaagcgctgatggtcatatccaatctcaatatctgggtcaatccacacccccttagaactgtggccgttcctccctgtctctcgttgatttgggagaatatggttttctaataaatctgtggatgttccttcttcaacagtatgagcaagtttatagacattcagagtagaaccacttgtggattggaataacccaaaactgccgatttcaggggcgggtgcattgtagttattattttaaaatagaaactaccccaccgactcatctttccttctctaagcacaaagtgatttggttattttggtacctgagaacgtaacagaattaaaaggcagttgctgtggaaacagtttgggttatttgggggttctgttggctttttaaaattttcttttttggatgtgtaaatttatcaatgatgaggtaagtgcgcaatgctaagctgtttgctcacgtgactgccagccccatcggagtctaagccggctttcctctattttggtttatttttgccacgtttaacacaaatggtaaactcctccacgtgcttcctgcgttccgtgcaagccgcctcggcgctgcctgcgttgcaaactgggctttgtagcgtctgccgtgtaacacccttcctctgatcgcaccgcccctcgcagagagtgtatcatctgttttatttttgtaaaaacaaagtgctaaataatatttattacttgtttggttgcaaaaacggaataaatgactgagtgttgagattttaaataaaatttaaagt

SEQ ID NO: 447 - protein, 323 aa, Homo sapiens
MDSDASLVSSRPSSPEPDDLFLPARSKGSSGSAFTGGTVSSSTPSDCPPELSAELRGAMGSAGAHPGDKLGGSGFKSSSSSTSSSTSSAAASSTKKDKKQMTEPELQQLRLKINSRERKRMHDLNIAMDGLREVMPYAHGPSVRKLSKIATLLLARNYILMLTNSLEEMKRLVSEIYGGHHAGFHPSACGGLAHSAPLPAATAHPAAAAHAAHHPAVHHPILPPAAAAAAAAAAAAAVSSASLPGSGLPSVGSIRPPHGLLKSPSAAAAAPLGGGGGGSGASGGFQHWGGMPCPCSMCQVPPPHHHVSAMGAGSLPRLTSDAK

SEQ ID NO: 448 - DNA, 2487 bp, Homo sapiens
ttggcctactggggcatttaaacagatttaacttggatacattggaatacaggtgaggacagaaggttctagacctgtatttccccttactgcatttctaccatggtaggaagacattcctaggtcaaaggaagaatgagaaacatgagggaatatcaacacttagagtgaaagatactatgaaaatatgacatggtaggaagacattcctaggtcaaaagaagaatgagaaacacaagggaatatcaacacttagagtcagagatactatgaaaatatgaaattccacagcaaggtcttccgagcctctaactctgcaaacttcctgacctggagagccttagccagctccatctgctgtgtacatgccttgcacacttgcacctctggcactgtcctctcacgaacggctgtctgttacctttctggacctaatcgccctgctctgtagtggcccttgcccctcactcacaggcttactgaagcaaaggcaagaatagaaaacaaagcatattttccatagctagatctctctgggaaacattgctgaatatttaatttggtctccaaatttgtttatttccccagtactcttagggaattaaaattttctaggcaagacaatggcagagaagttgatataaacatgcgtaccccccttagtttccggtcaaaacatcagagttggcatgcccatctctggttttgaagagcagcagataaactccatttcagtaaaagggtttggcaacatcagtgtataaaccactttcctcaatgtagcgtttgagagagtatttactccctcatagaaacttcataggaacatggcatttctccaagggtccttaatcatcaagggcctggagactaaccagctactttggaataatacttttaaaattatgaatagatataaggtgtgtttacttaatatagtgtgtggtattcgctacatttttttcaatttgcataatagcttattgggcagaagatttgtagactttgggatcatcctatgagttctaacatcatttcgcggaaccacgtgacgcgactgcttcagaactataagaaacaggtgagtttctctgaaagcacagccaactaaatgtttttaggatcctgtttgcccgtgacaacatatctgtatggacagcaattacagttcttatcactttattttaaaattgtgcttattgtggagaatcagcttacaccagaagtggtttcccttttagcctcggaattctatgattaacaagtcatcgttcagtgtagaatttctgcctctgaactacttcattgaaattctgacagatatagagtcctccaatcaaggtaatttactcccctgttctcagggtcttaccacttttcccttgacacatcagtccttccctattcacttctttgtcttctttccaaaatccttttaacatacaagtagacccttatagcaattggtttacattagcagtaccaaatttactacctagagtaaattaccaaataatcacctctgaagttttaaaagagtcaagaggtttaaagcccatttggttgatgcaaatgttcttggtgctgaagtttaaatttaagaacacattcttaaaaaattcattttactaaaatacaattatgattttaatgagctgtgagcacaaagttataaatgtttcacggacccatggtaaccctttttccctgccctctccccatttttttccagccctgtatccttttgaaggacatgacaatgtggatgcagaatttgtagaggaagcagctctgaaacacaccgcgatgcttttaggcttatgaaaaagacaacgcaattggatctgctgctgccattttaatcttgctcattaaccttactcctttgagaattctttaacaatatttaaaattggtaacaaaaatagtttagccataattgtttagccatgtgagtttcaggttggtacacgttcagacagaactgctgtatcacattccaattttgaatagccagtgagcaatcaagtgtagagaaatgataaatggcctaagaaggcatacagtggcataaacgatgctcttcctagtagcttaataggccacaagctagtttctgttgcactctgaaataaaatatgctttaaaaatgtagggaacagtgcttagaaaagcaaaaactaggtgtgtcattgaaataataggcataaaaattaaatgttacataagaacactatttggaaagagggtccttttaaaaactgaatttgtactaaatcagatttgccatgtccagtacagaataatttgtacttagtatttgcagcagggtttgtctttgtgaattcagatgaaacatatttatttttttttatttataaaaggttgatttaggaatattttgtcagtcattaaaaaacctgaaaacataaaaaaaaaaaaaaaaaaaaaaaaaaaaaaaaaaaaaaaaaaaaaaaaaaaaaaaaa

SEQ ID NO: 449 - protein, 198 aa, Homo sapiens
NLHSWVLHFNSRGSAAEFAVFHIMTRILEATNSLFLPLPPGFHTLHTILGVQCLPLHNLLHCIDSGVLLLTETAVIRLMKDLDNTEKNEKLKFSIIVRLPPLIGQKICRLWDHPMSSNIISRNHVTRLLQNYKKQPRNSMINKSSFSVEFLPLNYFIEILTDIESSNQALYPFEGHDNVDAEFVEEAALKHTAMLLGL

SEQ ID NO: 450 - DNA, 1460 bp, Homo sapiens
ggcacgaggcgacttcctctttccagtgcatttaaggcgcagcctggaagtgccagggagcactggaggccacccagtcatgggggacaccttcatccgtcacatcgccctgctgggctttgagaagcgcttcgtacccagccagcactatgtgtacatgttcctggtgaaatggcaggacctgtcggagaaggtggtctaccggcgcttcaccgagatctacgagttccataaaaccttaaaagaaatgttccctattgaggcaggggcgatcaatccagagaacaggatcatcccccacctcccagctcccaagtggtttgacgggcagcgggccgccgagaaccgccagggcacacttaccgagtactgcagcacgctcatgagcctgcccaccaagatctcccgctgtccccacctcctcgacttcttcaaggtgcgccctgatgacctcaagctccccacggacaaccagacaaaaaagccagagacatacttgatgcccaaagatggcaagagtaccgcgacagacatcaccggccccatcatcctgcagacgtaccgcgccattgccaactacgagaagacctcgggctccgagatggctctgtccacgggggacgtggtggaggtcgtagagaagagcgagagcggttggtggttctgtcagatgaaagcaaagcgaggctggatcccagcgtccttcctcgagcccctggacagtcctgacgagacggaagaccctgagcccaactatgcaggtgagccatacgtcgccatcaaggcctacactgctgtggagggggacgaggtgtccctgctcgagggtgaagctgttgaggtcattcacaagctcctggacggctggtgggtcatcaggaaagacgacgtcacaggctacttcccgtccatgtacctgcaaaagtcagggcaagacgtgtcccaggcccaacgccagatcaagcggggggcgccgccccgcaggtcgtccatccgcaacgcgcacagcatccaccagcggtcgcggaagcgcctcagccaggacgcctatcgccgcaacagcgtccgttttctgcagcagcgacgccgccaggcgcggccgggaccgcagagccccgggagcccgctcgaggaggagcggcagacgcagcgctctaaaccgcagccggcggtgcccccgcggccgagcgccgacctcatcctgaaccgctgcagcgagagcaccaagcggaagctggcgtctgccgtctgaggctggagcgcagtccccagctagcgtctcggcccttgccgccccgtgcctgtacatacgtgttctatagagcctggcgtctggacgccgagggcagccccgacccctgtccagcgcggctcccgccaccctcaataaatgttgcttggagtgaaaaaaaaaaaaaaaaaaaaaaaaaaaaaaaaaaaaaaaaaaaaaaaaaaaaaaa

SEQ ID NO: 451 - protein, 390 aa, Homo sapiens
MGDTFIRHIALLGFEKRFVPSQHYVYMFLVKWQDLSEKVVYRRFTEIYEFHKTLKEMFPIEAGAINPENRIIPHLPAPKWFDGQRAAENRQGTLTEYCSTLMSLPTKISRCPHLLDFFKVRPDDLKLPTDNQTKKPETYLMPKDGKSTATDITGPIILQTYRAIANYEKTSGSEMALSTGDVVEVVEKSESGWWFCQMKAKRGWIPASFLEPLDSPDETEDPEPNYAGEPYVAIKAYTAVEGDEVSLLEGEAVEVIHKLLDGWWVIRKDDVTGYFPSMYLQKSGQDVSQAQRQIKRGAPPRRSSIRNAHSIHQRSRKRLSQDAYRRNSVRFLQQRRRQARPGPQSPGSPLEEERQTQRSKPQPAVPPRPSADLILNRCSESTKRKLASAV

SEQ ID NO: 452 - DNA, 2835 bp, Homo sapiens
gtacagaagcaaaatcaaacctgctatttcagcactcctgtttttaacttggtgtctttagtgcttggattggtgggatgtttcggaatgggcattgtcgccaattttcaggagttagctgtgccagtggttcatgacgggggcgctcttttggcctttgtctgtggtgtcgtgtacacgctcctacagtccatcatctcttacaaatcatgtccccagtggaacagtctctcgacatgccacatacggatggtcatctctgccgtttcttgcgcagctgtcatccccatgattgtctgtgcttcactaatttccataaccaagctggagtggaatccaagagaaaaggattatgtatatcacgtagtgagtgcgatctgtgaatggacagtggcctttggttttattttctacttcctaactttcatccaagatttccagagtgtcaccctaaggatatccacagaaatcaatggtgatatttgaagaaagaagaattcagtctcactcagtgaatgtcgcaggccatttctaaaagtgctacagaggacagacagggttttgaggccaccctgattattgggatgcatctgcagcacatccaggacttgaatttcattacgagttcctaatagttgtatttctaaagatgtgtttcctagagaatgtacagccttatgacactgtagtgatgtttttataattttctaagtagatttttttatattaacaaattcatatacagaaaaaataaggtgttacaaaaaatggagagctcttatttttgtacagattctgtcgtttttttttatttgtgtgagatttatggaaatacactaaatgagtaattcaggttcagtacatttattacaaagtgaaatcaggggatattcatttgtaaattttattcttagtgaatgaactgtataattttttttatcaggagagcacttataaaattcaatttataaagatcatatacccaaatcataaagatttagttgatacattaacactaagatactctgatttttagcgaactaaacaaagtgcttctactgagaggcctttataccaccatgtacagtaactctaagtgaatacggaagaccttggttttgaaattctgccaccttgtttctccctgctcatgaggtcgcaccttttgctcttgctgctaattgcccattcgtagtgggtgtaatgccaggtggaatggtttcaacaagtcaggtgaaaaccatcctttattgttgctggcacaacttgatatatagtctgactcagaactgaagctcacatctcaaattcatttcatgccagtaaatgtggcaaagagaagaaaggcccaagagcgagacaagaagaatggagaagggggcagccaagaagaacttctgggttcagggtactgtttatttgctccttctcttcatgcctgtggctggatgtcccacaacactataagaaatataagtcaagccctttgtgttaagcaagaactacagactccatcttttcacccaaatcatgaatgaccaataaaaagcaagttattccagaggaagaagcagcccttgaaatgttaaggcttaggcttgaaaggtgaagagcaggaattctctctttcaaatcctagagcataaacccatgtgtggccaagtgagatcagccctcaagggcacatgccaagggcagagcagcccatgtagacagcttcggagggcatgggggtgtagggagttcggggtagctcctcattaactatttgttgggtgagtaaaggggtgaggctcagtggcaggtacctctgcaatgacaagctgcctcccctctatgtgtttagcatatgttattagaacatgtccgacacccctaccgctgccatttgggccctttaataaagccaagtagagaaatctggcaataaaaggcaaatgtaagcatgctttctttaagacgcatcataaatggttttctttaagtgaatggaagagtttgacagagatacacctttgtaagaaaacattaagaatgctggctggctgtggtggctcacacctgtattcccagcactttgggaggcctaggcaggaggattgcttgagcctgggacttcgagaccagactgggaaacatggcaaaatcccatctctacaacaaaaatacaaaaattagccaagtgcggtggtgtgcctgtagtcctagttacttgggaggctgaggtgggagaatcacctgagcccaggaggtggaggctgcagtgagccatgccaatgcactccagtctgggcaacagagtgagaccctgtctcaaaaataaataaataaataaatgaataaagagaatgctaatcatttctgggttcactgcgactcactgtagtgctggggatcccccttgtaacactggaactgaaaggcagtgatgaaagctatgtcaagcattcattattctgaagaggaggagaaatgccacatacctttcccatgggacctgtggtggaatgaatccatacttctgcctcacttcgagcagacttttgttctcggcgctcctcacgatggagtttcatgcttcattttcacatctctctgcacaattagattgggagctccttgagggcagagtacgtgccttaatctttatctttgtaatgccacaatgaacagagtgcctcctggtacactgtaggagcttaagaaatactcactgaatgcatgaatgaatgaatgaacaaatgaaggaatgactaaggatgtttgtagtgctataatatagaatgggatttactctgctttaccagttagtttcataataaacaaatagtctgt

SEQ ID NO: 453 - protein, 132 aa, Homo sapiens
MGIVANFQELAVPVVHDGGALLAFVCGVVYTLLQSIISYKSCPQWNSLSTCHIRMVISAVSCAAVIPMIVCASLISITKLEWNPREKDYVYHVVSAICEWTVAFGFIFYFLTFIQDFQSVTLRISTEINGDI

SEQ ID NO: 454 - DNA, 2918 bp, Homo sapiens
gggctccggcgagggacagacgcaccgatcgccggagggacagacacacgaccacgcggcgccaccgcccacgcctccacccaccggcgcccaagtcctccccgcgccgcctcctctgtatggcacaaactttcctcccgggacggaacacgctgcctcagggagcccgcgaccgcgccttctcctccgccggtcccatacgctgctgaaatgggttgcggattgaacaagttagagaaacgtgatgaaaaacggcctgggaatatttattcaactttgaagaggcctcaggtggaaaccaagatagatgtgtcctatgaataccgcttcctggagttcacgactctgagtgctgcggagctccctgggtcctcagcagtgaggctggcctccctgcgtgacctgcccgcccagctcctggagctgtaccagcagggcttctcgctggcggccctgcaccccttcgtgcagcccacccatgagcgggagaagacgcccctggagcacatctttagagccatcctgatcaagaaaaccgacagatctcagaaaactgatcttcacaatgaaggctacatcttggaattagattgctgttcctccttagaccacccgacagaccagaaactcatcccagagttcattaagaagatccaggaggctgcaagccagggcctgaaattcgttggtgttatacctcagtaccattcctctgtgaactcggcaggcagcagtgctccggtgtctactgccaacagcaccgaggatgccagagatgcaaaaaacgcacgtggggatcacgcgtcactggagaatgagaaaccggggactggggatgtgtgcagtgctccggctgggagaaaccaaagcccagagcccagctcaggccccagaggggaggtgcccctcgccaagcagcccagctcaccctccggagagggagatggtggagaactttcaccacagggggtgagcaagacactggatggaccggagagcaaccccttggaggtgcatgaagagccactctcagggaaaatggagatcttcacccttttcaacaaaccgaagagccatcagaagtgccggcaatactaccctgtcaccattcctctccatgtctccaagaatggccagacagtgagcggtttggacgccaactggttagagcacatgagcgaccacttccggaaaggaggcatgctggtgaacgcagtcttctaccttggaatagtgaatgattccttacatggcttgacagatggagtattcatctttgaagctgtttccacagaagatagcaaaaccatacagggctatgatgctattgtggttgaacaatggacagtcctggaaggtgtcgaagtgcagacagactacgtgcccctgctgaactcgctggcggcctatggctggcagctcacctgtgtgctaccaactcccgtcgtcaagactaccagcgaggggagtgtatccaccaagcagattgtctttcttcagagaccttgtctacctcagaaaatcaagaagaaggaatcgaagtttcagtggcgattctccagagaagaaatgcacaacaggcagatgaggaaatcaaaaggtaaactcagtgccagagacaaacaacaagcagaagaaaatgagaagaacttagaagaccagtcttccaaagctggagacatgggaaactgtgtttcaggacagcagcaggagggtggagtctccgaggagatgaagggccctgtccaagaggacaagggagaacagctgtcccctggtggcctgctgtgtggggtgggtgtggagggtgaggctgtgcagaatggtcctgccagccacagcagggccctggtggggatttgcactgggcactccaatcctggagaggatgccagggacggggatgctgaggaagtcagagagcttggtacggttgaagaaaactgagtcttgggcaatttgtgctaaaactaggtgagttgccaaacccaaggcatcttaccaacagctggtttgggggctggtttccctggtgttgtgtgttacctaccctttggcttggcttgacctctccttgtgagctcacctgagccctcccagggccaggttcctgacagtgttggtttttgcacatccactggaaaggtgtcattaatgacccagtgttagaatgcaagaggtcaggttattctagccctcatggctgaaggcccagtcctggctccaccactcctccagccagagggtctggaccatccagtgcctgtcctcgccacagggcctccagggagcattcgggtcaaatccatggacaccctgggctacaaaccaaggctgctgttcatcccacatcgtgtggggcagtgtccatcccctgcagctacttggtgacttaacaactccaggagccctgtcagctgccctcctccacctaaaccccttcgactcttctgctttgacaaagaaaatgacattggggaggggaggtgctccgcctcccagcttttctcaaaatagtcctatagatactggtaatctggaaatgaagaagtaattctgtctctgcacctacttttgcagaatgttcaaggaagtattctgtgttagtattaatgccaaaaagttgtttttaaaggttttgtactcagcacatcatacaaaccacattacttctgtcacttcagggcatcgggactggctggcgcccttgttatgtgctattttaatcagtgtaacattggtcaagttgttacccatgtatgctgtgtttatcatgtgtatatcgtccagaaagtattaaggctttaggtagatgcaactggcgaaccttggagagggaatgctgattgtcttgaccaaacccacagcctgtctcttctcttgtttagttacttacggcaataaatcatctatgagtt

SEQ ID NO: 455 - protein, 648 aa, Homo sapiens
GLRRGTDAPIAGGTDTRPRGATAHASTHRRPSPPRAASSVWHKLSSRDGTRCLREPATAPSPPPVPYAAEMGCGLNKLEKRDEKRPGNIYSTLKRPQVETKIDVSYEYRFLEFTTLSAAELPGSSAVRLASLRDLPAQLLELYQQGFSLAALHPFVQPTHEREKTPLEHIFRAILIKKTDRSQKTDLHNEGYILELDCCSSLDHPTDQKLIPEFIKKIQEAASQGLKFVGVIPQYHSSVNSAGSSAPVSTANSTEDARDAKNARGDHASLENEKPGTGDVCSAPAGRNQSPEPSSGPRGEVPLAKQPSSPSGEGDGGELSPQGVSKTLDGPESNPLEVHEEPLSGKMEIFTLFNKPKSHQKCRQYYPVTIPLHVSKNGQTVSGLDANWLEHMSDHFRKGGMLVNAVFYLGIVNDSLHGLTDGVFIFEAVSTEDSKTIQGYDAIVVEQWTVLEGVEVQTDYVPLLNSLAAYGWQLTCVLPTPVVKTTSEGSVSTKQIVFLQRPCLPQKIKKKESKFQWRFSREEMHNRQMRKSKGKLSARDKQQAEENEKNLEDQSSKAGDMGNCVSGQQQEGGVSEEMKGPVQEDKGEQLSPGGLLCGVGVEGEAVQNGPASHSRALVGICTGHSNPGEDARDGDAEEVRELGTVEEN

SEQ ID NO: 456 - DNA, 2010 bp, Homo sapiens
gtcgactaccagaaaatactttcaacataaatgaactctccaacttattaaacttttatatagatagaggaagacagctctttcgggataaccacctgatacctgcagaaacccccagtcctgttattttcagtgattttccatttatctttaattcgctatccaaaattaaattattgcaagctgattcacatataaagatgcagatgtcagaaaagaaagcatacatgcttatgcatgaaacaattctgcaaaaaaaggatgaatttcctccatcacccagatttatacttagagtcagacgaagtcgcctggttaaagatgctctgcgtcaattaagtcaagctgaagctactgacttctgcaaagtattagtggttgaatttattaatgaaatttgtcctgagtctggaggggttagttcagagttcttccactgtatgtttgaagagatgaccaagccagaatatggaatgttcatgtatcctgaaatgtgttcctgcatgtggtttcctgccaagcctaaacctgagaagaaaagatatttcctctttggaatgctgtgtggactctccttattcaatttaaatgttgctaaccttcctttcccactggctctgtataaaaaacttctggaccaaaagccatcattggaagatttaaaagaactcagtcctcggttggggaagagtttgcaagaagttctagatgatgctgctgatgacattggagatgcgctctgcatacgcttttctatacactgggaccaaaatgatgttgacttaattccaaatgggatctccatacctgtggaccaaaccaacaagagagactatgtttctaagtatattgattacattttcaacgtctctgtaaaagcagtttatgaggaatttcagagaggattttatagagtctgtgagaaggagatacttagacatttctaccctgaagaactaatgacagcaatcattggaaatactgattatgactggaaacagtttgaacagaattcaaagtatgagcaaggataccaaaaatcacatcctactatacagttgttttggaaggctttccacaagctaaccttggatgaaaagaaaaaattcctctttttccttacaggacgtgataggctgcatgcaagaggcatacagaaaatggaaatagtatttcgctgtcctgaaactttcagtgaaagagatcacccaacatcaataacttgtcataatattctctccctccctaagtattctacaatggaaagaatggaggaagcactccaagtagccatcaacaacaacagaggatttgtctcacccatgctcacacagtcataatcacctctgagagactcagggtgggctttctcacacttggatccttctgttcttccttacacctaaataatacaagagattaatgaatagtggttagaagtagttgagggagagattgggggaatggggagatgatgatgatggtcaaagggtgcaaaatctcacacaagactgaggcaggagaatagggtacagagatagggatctaaggatgacttggacacactccctggcactgaagagtctgaacactggcctgtgattggtccattccaggaccttcatttgcataaggtatcaaaccacatcagcctctgattggccatgggccagacctgcactctggccaatgattggttcattccaggacattcatttgcataaggagtcaaaccacaccagtcttggattggctgtgagccaattcacctcagtctctaattggctgtgagtcagtctttcatttacatagggtgtaaccatcaagaaacctctacagggtacttaagccccagaagattttgctaccagggctcttgagccacttgctctagcccactcccaccctgtggaatgtactttcacttttgctgcttcactgccttgtgctccaataaatccactccttcaccacccaaaaaaaaaaaaaaaaaaaaaaaaaaaaaaaaaa

SEQ ID NO: 457 - protein, 379 aa, Homo sapiens
MQMSEKKAYMLMHETILQKKDEFPPSPRFILRVRRSRLVKDALRQLSQAEATDFCKVLVVEFINEICPESGGVSSEFFHCMFEEMTKPEYGMFMYPEMCSCMWFPAKPKPEKKRYFLFGMLCGLSLFNLNVANLPFPLALYKKLLDQKPSLEDLKELSPRLGKSLQEVLDDAADDIGDALCIRFSIHWDQNDVDLIPNGISIPVDQTNKRDYVSKYIDYIFNVSVKAVYEEFQRGFYRVCEKEILRHFYPEELMTAIIGNTDYDWKQFEQNSKYEQGYQKSHPTIQLFWKAFHKLTLDEKKKFLFFLTGRDRLHARGIQKMEIVFRCPETFSERDHPTSITCHNILSLPKYSTMERMEEALQVAINNNRGFVSPMLTQS

SEQ ID NO: 458 - DNA, 3097 bp, Homo sapiens
actgtaaatatggattttttttttttttggtcttatttctgtccctttccctggtttgttatcgtaacctgtagtgccaactctgcttccagaggggtagtgcaggatgaaatgctgaccctgatgttgcttctcattcataaataagtagaaagttgtttctccagtcttttgggaacacaggacttaaaagtcacatcatgtgtagatattacaagcagcattaccaagacatggcaaaaagagtttgtctgaattgtaatgttgcgtttgtgaacctattctgggattttcagaggtacaaggttagaatgctacaatgttaccactgtgccttccaatgtttatatcatcggaaacataacataatcaaagtggctgtgatttaacaaaatgattaaagtgttacctacctgtgtagccgaagtagtgtgcagtgaggcgtttctgaatacatggtcagatttttggaaaaaaacaaaaacaaaaaaaacaagtaaagttcaaaaaccgtcaaatgagaaaattgcaagtagtgtgacagagctgattgattttgttgctttcttgattttttttttcaaaatgggtttactaaaatgtagatgacttaactgcctcctccttcgtctgaaaaatgccaatattcaatcatcatgcagcattataacaagccttataagtcctaaagcattaagttgcacttttttgaggaggggtagtgcagtatttctctggccagtatgaatgaagtttatacttaccatatttgatagaaacatagatcaagctatggcacagcgactcatcagatagctagctttgacgtctgggcacaattgaaccaacttccatcgtgaatctttataatgattgactttggtgtatagtgcagtaaacaaatagtgctcctagttaagtatttgtcagcatccttttgtctctaacttgtttctatttttacagccacacaattcttggcatgtattaagaaaaaaaaaaatccctgttcaagtagtttttccacctatcagcactgagtaaatgccataaatccattgaaatggtctaaatgttccatctgttctcctgttttgccagttatatagtaatgaaatacatttgtaaattttatgcaacaaatggcaaacgtatcattattttgaaattgtgtatgtaaaagttatatttttacatgtagactcttgttattatgtgttttaatacattgtatcagtttttgtttttttttaaaaactgtggtttaaaaagaagtctcatttaaatgaaatagctacaagaatcagaattttatgttcatttctgaaaatgtaagaacaaataagatagttaccacgtggtcatcttttacaaacccataaacattttgattagctgtgtgtgtgttgaaaaactgtaaatatgttcagtagcgataaaactaaaataactttgatttgttgataagttcctaaaatgtggaggtggattaaaaccttaggagaatagcagaaatcaaacttcatgaaaagttattttggggctttcctgtgaaatgtatgaacaaagaggctcagagaaggacatggaagacaataatgtatactctctcctcctccctgaataatgaaaaccatgtgtatttgttccctccgtatgttaaagatttccttttagtggtacattctgcactcattttgtatagtctaccaaggcgggtatccctaggaacaatattatataggaagcaggtatactctgatcacattcaggataagtgtacagaagaaaatacggtgtttactctttagggaactggaaacactccctgcattgatgtacattttaagaatggcacttttgatacatgttatcataaaggtgcttaatagagctgaattaaagtttttcaaatctgtaaacaaagcaaaaaagtaaattgtagtcatttgattattttttaaattggtgctttatattttgttctcactcagagtaaaagctgcaatttattgttcaccagctttgatgtattcattactcagtaatgcaatacctctattgttgaattccctttggaaataagtgaaaattctaacggccactgaaagctgctcgctaggttttgcttggtggagaaacataatctgcacctatccatattaattgggttgtatccccattaaaaaagaaaaaaagggaatgtggcctttttagtgtgttttttattgttgttgttttgtaattatcaaacccaggtaagatattggtatcctgcactggattttcaaatgaagttcagcagaagacagttaagattaaagtactatacaaaaatttcaaaagggtccatactacgctatctgtatgacgacacttaggctggagatctctttcagaaactcggactttaaaagcaacttggagcagttgatccacctccacattcaagtaatttatgaatatgcagaatagggatctgttcatctagaaatttttaccatttgtcttctgtgtagctgcaaggaacactaatgtttatacaactgtcagtccacccagtggtgcaactggttctgattcagtcttccgattcctttttatttttcactttttcctatttctgaatttttttttttatttgtgatcttgattttgatgaggggttggggagtggggagggagtcgaaccaagacttggagttaagaggattttcatcttttgcatccaacaggcagaatatgatctgtgtccaaaagtgaacttgagtcaggaatgaatcaatttcagcataaacaagcacaaaaatttagtctgctggctgactggaagcaaaaaagtcaagatggaatatgatgaattccaacacaatggggcaccaaggcctttaggcctctctttttattttgctttggttttgtttgtttttctttagagacatgctctttctcatgggacttgaagtggactcatctttgtgcagtgctggttttgccatactcatttcaagtattatagacatatgtaatggtgaaaatatatgaactgtggcctttttcattcttgttacttgtgatgcaattaagtgaagataag

SEQ ID NO: 459 - DNA, 5650 bp, Homo sapiens
ggcgcggtcgaggcccggaggcggcggcgcaggaggaagcggaggaggtcgggcgctcggggcccgggaggcgggccgcgcagcgccgcagccccgggctcgccatgctcctggcctcggccgtggtggtctgggaatggctgaacgagcacggccgctggcgtccctacagcccagcggtgagccaccacatcgaggcggtggtccgcgccggcccccgcgcggggggcagcgtggtgctgggccaggtggacagccgtctcgcgccctacatcatcgacctgcagtccatgaaccagttccgccaagacacgggaactctccgcccagttcgccgcaactactacgacccctcctcggcccctgggaagggcgtggtgtgggagtgggagaacgacaatggctcctggacgccctacgacatggaagtgggcatcaccatccagcatgcctatgagaagcagcacccctggatcgacctcacttccattggctttagctacgtaattgacttcaacaccatgggccagatcaaccgtcagacccagcgccaacgccgcgtccgccggcgcctcgacctcatctaccccatggtcacagggaccttgcctaaggctcagtcctggccagtcagccctgggccagccacctcgccccccatgtccccctgctcctgtccccagtgtgtcttggtgatgagtgttaaggcagccgtggtcaatggcagcactgggcccctacagctgccagtgacccgcaagaacatgccgcctcctggagtggtcaagctacccccactgccaggctctggggccaagccactggacagcacaggcaccattcgaggcccactgaagaccgccccatcgcaggtgatccggagacaagcctccagcatgcccactgggacaaccatgggctctcctgccagtcccccaggacccaacagcaagaccggaagggtggccctggccaccttgaatcgtaccaacctgcagcgactggccattgcccagtcccgggtgctgatcgcctctggggtccccacagtcccagtgaagaacctaaatgggtccagtcctgtcaaccctgccttggcaggaatcactgggatcctcatgagtgcagcggggctgcctgtgtgtctcaccaggccaccaaagctggtcctacacccaccccccgtcagcaagagtgaaataaaatccatcccaggggtttccaacacaagccgcaagaccaccaaaaaacaagccaagaaaggtaaaaccccagaggaagtgctaaaaaaatatctacagaaagtccggcacccaccagatgaggactgcaccatctgtatggaacgcctcacggccccctcaggctacaagggcccgcagcctacggtaaaacctgacctggtagggaagctgtccagatgcggccacgtctaccacatctactgcttggttgccatgtacaacaatgggaacaaggatggaagtttgcagtgtccaacctgcaagaccatttatggggtgaagacaggcacccaacctccagggaagatggagtaccacctcatcccccactccttgcctggccacccagactgcaaaaccatccggatcatctacagcatcccccccggcattcagggaccggaacacccgaatcctgggaagagtttcagcgcccgaggcttcccacgacactgttaccttccggacagcgagaaagggagaaaagttctgaagctgctgctcgtggcctgggatcgccgcctcatttttgccattggcacctccagcaccacaggcgagtcagacaccgtcatctggaatgaggtccaccacaagacagagtttggctctaatctcactggccatggctacccagatgccaattacctggataatgtgctggctgaactggctgcccagggcatctctgaggacagcactgcccaggagaaggactgaggccagaaaagctttgaggtgggaggggccatggagactgcaggacaggaagtgaggagagtgagtcaatgtagaagaagttggtgtcctgccctcccaactttctatcctcccctcctgccctgtgtccatccctcatccctcccaaccacagtgggagccagactgaatatagcgacatcattcataaatctcatccaacacaaagggagatgggatgagggccatcctgggtctgttcccatggagtttttggtgctgggtaggcaggaatcccctccctaccccacctcccaagtaggggcatggtcagcacacctagggtatgggcagtgcttaggcactccatatcctggctttgggaagccggggtttcttgcctcagccggcttcttgctacttccactctgctttgagactggagtttctgctattctccctctgctggaggcagggagctctcactgtgcaaggttggggggtgggcaaaggggtgaatcactaaactgctgtgacatcagaaactgatgccttggtgtagagcaaggaagcacttcttcccaagagggtcggagaaggaaaagcctctgggagcacattctgctgtcatcacagtccttggcttctctgggccctcctctcctcctcacagctctcacctgtccaaagaggcatctggttctctcatgtggatggatggactctggggttcctctttggagtggcatcccatgatgctgtttctagaccctctctgatcaaaccagagcctgcatcccactgagcatctgaactgtcctcagggagaggagcccacagccttcttcccaactcattctagaccagctcaaagattccatgagtttcatcgagtcactgtgagtggagcccatgctgggctctgtgccctctgtgtctgtgcatgcgcgtgtgtgtgtgggcgtgtgtgcattgctgggccagcttgaagggaaggcccgtcatgtccctgcactctgttttgcaagatgccaaaccccagttctgatggggctccaacagccaggctgtggtcctttgacgttcctcacctgttgccaacctatcccgtagtgaactgaaaccccaatgaagacagaactgtgcctggggagatgcaatgaggtgagggctgaactcatccttttatatttcttttcaagattggatcagagctcatctccatccagtcttgtttctatgaaggcttcaatctgtttccatgcaaatttgctaatcagagcccagagctgctgggtccctcatctccctcatctattatagattgacttacagcagggagagaatctctttagctcattcctaatggggttgggatcacaatatggtctggtccaatctgcatcttgttgtgtcccaagaccctatctcctccccaacattcttattgcctttggctcccagtaaggaacgaattgggggccagggaggagaacaggggggatcaagaagggaaacccaattccccctttgaaagtgggttctttgaactatgtgtttgggggaagttcctctggatactaatttgaatttatatacctcatgttttgggggtttgacgtatatatatatatatatatatatatatgcatatatatttcataatatttggaaggtttttgatgctagaaaaatggaaacaagagaaccttcaaaaatggtacttagatgggaactggaggccaatctttcataaagccagccccatagctgcttgctgttaggcctccagccattttgacattggggtggatagtcgattcacctgcctgtcagtcgattcacctgcctgtcacccagttctgtggatgtgctggtgctgagcctttgctctctttccaaatggttacagggatgttgatcagctccaccagagggagctctgatgggaggaattgctctgccatccttgtccctgtgtctcctgtcggcaggcagccattgtatctcaccagcagaccaggagactggtcccaaggttactgcaccacagggcaatttcctgccatagttaggaaggaaacacctgaactaaatggaagagacatccctgcggtgtttaatatcacacccatgccctttgtcaggttaccatgtacagagattacttggagagcctcatgccgtctctaccttcgcacactggtcaagtatctgctgagcttcttggccgcaaggatgcagaaataggctgagggtccatgggaagaaagacacaatgaggcagtaggaggtggggaagaaaagaagacagactttcaaaatggaattaggcactggggagagatcagtttccccacatcagggagaagaaggtataggtggggaagggggtggccaggagcagaaggaagaagactcaagatggaaagggagccgctgtgcctgtggcaataccacttggagaggtcgacttcataccttcaagccttttcccctgggcttttgattgtgtctgtgccccctttcttgtcctctctgcagatgcccagtaggggctacctcatcctcgtgctgttcttgtgtggctttctgggcagtagggatcttgaatttcctttctaacactgtgcccggcaaggcggggagcattcctctgccctttgtcttgtgccaacctggaaaggtgcagtctagatttcagtgagaaccctgccagctgagccctgtgcatctactaccttgacacagagtgttttcccactagaagctctgctctgctctcctggcccaagtaggggattccatgccttccctttcatggtcttagcaccagcagcctagtttctcccttccagagtctccagggatgacaaattggattggagacaaacctcgtcagatgctcatcccctaaaaggttaattgtgtatttgtggctgcgtgtgcctttgtgttttcattctcttcccatttttgtacattttggtcttctctgtggttttatacttggtcaaaagtactcgtcttggtattgcactgttgtgtgcatgagaaaactgggggaaggctcactggtacaagaaaggacccctgacccctttccttctctgtggtccccggcattagattgggggttctgggagaggcaggtgaatgtcctaagtgaattgttctgtttgtaactggaatgtttttgaagtctttggtgttgctccgtgaaaggacatcgccacctggtgctcatgaggtgtctttgcagaacaataaatggcaaatgaacaaccacaaaattgttactcttgttggccttctgctgtttgtagattagtgcacctatctgtgagggatttgggttacctccctgagtctgtaagcaaccacaagccctgccactgggtgggggaagtccctccccaaccacttaaaaacaaattttccacatattacccacccacacatttgacctggctagactctttgtttgcctaaaggaacagaccacattgctgggaaaatgagtaagtgaacgtgtgggagaaaaacacttttagaatcacgaatattcacttttaaaggtctctttgcctggctgcaatatagtgtgtgtttaaattatttacaggctgttgtttctcaaataaatgtttaatattaatcattcccaaactgacaagaacacaaaaataaaatgcaaatacagagcc

SEQ ID NO: 460 - protein, 653 aa, Homo sapiens
RGRGPEAAAQEEAEEVGRSGPGRRAAQRRSPGLAMLLASAVVVWEWLNEHGRWRPYSPAVSHHIEAVVRAGPRAGGSVVLGQVDSRLAPYIIDLQSMNQFRQDTGTLRPVRRNYYDPSSAPGKGVVWEWENDNGSWTPYDMEVGITIQHAYEKQHPWIDLTSIGFSYVIDFNTMGQINRQTQRQRRVRRRLDLIYPMVTGTLPKAQSWPVSPGPATSPPMSPCSCPQCVLVMSVKAAVVNGSTGPLQLPVTRKNMPPPGVVKLPPLPGSGAKPLDSTGTIRGPLKTAPSQVIRRQASSMPTGTTMGSPASPPGPNSKTGRVALATLNRTNLQRLAIAQSRVLIASGVPTVPVKNLNGSSPVNPALAGITGILMSAAGLPVCLTRPPKLVLHPPPVSKSEIKSIPGVSNTSRKTTKKQAKKGKTPEEVLKKYLQKVRHPPDEDCTICMERLTAPSGYKGPQPTVKPDLVGKLSRCGHVYHIYCLVAMYNNGNKDGSLQCPTCKTIYGVKTGTQPPGKMEYHLIPHSLPGHPDCKTIRIIYSIPPGIQGPEHPNPGKSFSARGFPRHCYLPDSEKGRKVLKLLLVAWDRRLIFAIGTSSTTGESDTVIWNEVHHKTEFGSNLTGHGYPDANYLDNVLAELAAQGISEDSTAQEKD

SEQ ID NO: 461 - DNA, 1666 bp, Homo sapiens
tgcgcggctgctgggtgaacggcatccgcaggctcatcgtcagccggcgcggcgacgaagaggagttcttcgagatccgcacggagtggtcggaccgcagcgtgctctacctgcaccgcagcctggcggacctgggccgcctgtggcagcgcctgcgcgacgcctttcccgaggaccggtccgaactggcgcaggggccgctgcggcaaggactggttgccataaaggaagcccacgacatagagaccaggcttaatgaggtggagaagctgctgaagacgatcataagcatgccctgtaaatattctagatcggaagttgtgctcaccttcttcgaacgatctcctctggatcaggtgttaaaaaatgataatgtgcataaaattcaacccagctttcaaagtccagtcaaaatatcagaaatcatgaggtccaatggattttgtttagcaaataccgaaacaatagttattgaccacagtataccaaatggaagagaccagcagctgggcgtggacccaacagagcatttatttgagaatggcagtgagtttccctcagagctggaggacggggacgacccagcagcctacgtcaccaacctgtcatattaccacctggtccccttcgagacagacatttgggactgaacctctctatcaggcctcccccgcctcagctgttcactgccagctctgatgctgtccactgtgctggcccccatggtcacagctgctgccccagctctggaactcccagacgtcccaggccccactgacgccaggaggcctgggtgtcctgcaagtggagcagcaggggctcctagtgggccaggctgaccgcagagtctccagcaagctgaggtcacagccggaggccacagggcctgtgttctgagggtcttcactccctgcttggtgcccacagggctgcgcactgccagggcagggacagttcctgtggggctcgctctcactgctactgcttcctgggaggtgcatccctcttggtgaagtggcctagtgccccccagccaccctgactccccaccattccctcccacggcaaacgcacaaaacgtcttgagggagattttgacaagtcacccattccaggtgccacaggcaggggatgtttagtaatccaggatttctctgagaactgggatatgtggcctttttttttttctttttatcttttatctggaaactgggtttgggtcaaccccaggagtatttgcagaaggcccagcacagtggggggtattggctgcagggcagggaaggcattgccgactagataaccgtgtgagcttggactgagcgttggtggttcttcccaaaggaaaggaatttcttcccggcctgccaggtctctgggccttcagcgcgggtcctggtgctgcggccacaccaccctggggtgctcattgacagagctgccataatgaacttgaaaggacgggaatcacgagggaagctggggctcccctgcccacaggagaggatccccgttcttcaagcttctctgctcagtgtctactaacgaccgacatttgctaatgtaaataatagtaaattattgagaattctaattcttttacacagtctgtttttaatctattttaattaaataaaatctatgactctaaaaaaaaaaaaaaaaa

SEQ ID NO: 462 - protein, 231 aa, Homo sapiens
MASAVFEGTSLVNMFVRGCWVNGIRRLIVSRRGDEEEFFEIRTEWSDRSVLYLHRSLADLGRLWQRLRDAFPEDRSELAQGPLRQGLVAIKEAHDIETRLNEVEKLLKTIISMPCKYSRSEVVLTFFERSPLDQVLKNDNVHKIQPSFQSPVKISEIMRSNGFCLANTETIVIDHSIPNGRDQQLGVDPTEHLFENGSEFPSELEDGDDPAAYVTNLSYYHLVPFETDIWD

SEQ ID NO: 463 - DNA, 1434 bp, Homo sapiens
ggggaagtcgaggcgggagtgactctgcttccgtttctggttttgctctagtgtttgggtttcttcgcggctgctcaagatgaaccgactcttcgggaaagcgaaacccaaggctccgccgcccagcctgactggctgcattggcacggtggacagtagagcagaatccattgacaagaagatttctcgattggatgctgagctagtgaagtataaggatcagatcaagaagatgagagagggtcctgcaaagaatatggtcaagcagaaagccttgcgagttttaaagcaaaagaggatgtatgagcagcagcgggacaatcttgcccaacagtcattcaacatggaacaagccaattataccatccagtctttgaaggacaccaagaccacggttgatgctatgaaactgggagtaaaggaaatgaagaaggcatacaagcaagtgaagatcgaccagattgaggatttacaagaccagctagaggatatgatggaagatgcaaatgaaatccaagaagcactgagtcgcagttatggcaccccagaactggatgaagatgatttagaagcagagttggatgcactaggtgatgagcttctggctgatgaagacagttcttatttggatgaggcagcatctgcacctgcaattccagaaggtgttcccactgatacaaaaaacaaggatggagttctggtggatgaatttggattgccacagatccctgcttcatagatttgcatcattcaagcatatcttgtaaaacaaacacatattatgggactaggaaatatttatctttccaaatttgccataacagatttaggtttctttcctttctttgaaggaaagtttaattacattgctcttttattttttccattaagagactcattgcttgggaaatgctttcttcgtactaaaatttgattcctttttttcttatgaaaaacgaactcagtttaaaagtatttttagctcgtatgacttgttttcattcattaataataatttgaaataaaactaaggaaatggaatcttaaaagtctatgacagtgtaactctacagtctcaaaatgacctgataaattgataagacaaagatgagattattggggctgttcatattatgattcagaatcattttctattgtggtattataggttggttaaagtgatggcctttttgatgggttttgttgtgtcttgtgaacaagtcgttactgtgtccattattggaatggaattatcactactgtatcatgagtgggtattttgattctatggttccctcagtattacatcttgacttgtaatcaattatgaatatttcttgatatttaatgtataggacatttatttatactcaataaatatttttcaaaaggaaaaaaaaaaaaatcaaaaaaaaaaaaaaaaaaaaaaaaaaa

SEQ ID NO: 464 - protein, 219 aa, Homo sapiens
MNRLFGKAKPKAPPPSLTGCIGTVDSRAESIDKKISRLDAELVKYKDQIKKMREGPAKNMVKQKALRVLKQKRMYEQQRDNLAQQSFNMEQANYTIQSLKDTKTTVDAMKLGVKEMKKAYKQVKIDQIEDLQDQLEDMMEDANEIQEALSRSYGTPELDEDDLEAELDALGDELLADEDSSYLDEAASAPAIPEGVPTDTKNKDGVLVDEFGLPQIPAS

SEQ ID NO: 465 - DNA, 3009 bp, Homo sapiens
tggcctacttttcctggtcattttcttccacctacttaatgttcaacatccagacctgatctgccacaatctctttctgacaggaaataatgaaatgattgatatgctacctcattgccctttacagtcattgtcagggtccctggtattggattgttgttctggaaagctctatagagcactgctcagccagtcgtctttattacagcttctgcagaacacttgcttagactgtgagaagatggctgcgttgcactgtgcgctctactgcggtcaaggtgcgcagttcctggaagcccagattattcagtggatttctgagaatgtctctgcctgccattcatttgacctcattcaggaatttataattgcttctttatactggagtgtatattcagagacaagtaacatggacatactattgccacattccttaatgctcacttggaatccagaaatttctggaataactcttgtgaaagaagacattgcattgcctcttatgaaggtgctcagctttaagggctactgggaaaaactgaactccaacctagaatatgttaagtacgccaagccacacttccactataacaacagtgtggtcaggagagagtggcacaacctgatctctgaagaggtatgagtgggtcagtgagaacaaagccagcagcgaggcatagtggactggatccaggtgatgcctttaaatcataaggctggcttccatgtgcagcactcttcccaattgccagggacttgatcattgtcattactgatctcaatgggcagagagcttctatgatctctgttctagggaggaaactgaaaagcagaaagtttaaggggacacacagcacattcatagtagaagtatgattaatatccatgtctcagatgtgttctcaggttacttatgtagttaaaaattgatattaaaaaatctaggtgttcccaacttagtggtcattaggggttggggtagttggagggagaatagtggacgtgactcactgtccaggggtgacccagggaaatctttgggggtgatcgaagacttctatgtgttgattgtggtggtacattgtagggacatgaatctaaacatgataaaatgacatagaatgacacacacacattgtgccaatgtcaatttttgattttgatattgtgctctagttaggtaagatataagcactgaggagactgggttgagggtacattgcatctctctctagtatcgctgcatgtagattagtgttgttgtgtgtagtatatagttgactcgcagtttcctgtgaatctgtaattgtttcagaataaaatatttcttaaaactttaaaaaaaatctaggtgttctgattacctggaaagtatatttcttctctctgatgctcttaactgtattgcattatatccttgacgtgaaaaagtcaccgataaaacctttaccttccacattcctgacgtgttctcactcctaggaaacaggaaaaagaaggtctgcggcatacgtgaggaatattcttgataatgcagtaaaggtgatttctaacctagaagcaagaaattcggggccaagattaacacccctcctgcaggaggaagacagccaccagcggctgctcatggggctgatggtgtctgagctaaaagaccattttttgagacacctacagggtgtagaaaagaagaaaattgaacagatggttctggactacatttcaaaactgctggatctcatttgccacatcgtagaaaccaattggaggaaacataatcttcattcctgggttctccacttcaatagtcgtggcagtgctgctgaatttgcagtttttcacatcatgaccaggattctggaagctacaaacagtttgtttttacctctgcctcctggttttcatactctgcacaccatcctcggggtccagtgtctccctttgcataacctgctgcattgcattgacagtggagtgttgcttctcactgaaacagctgtcataaggctcatgaaagatctggataatacagagaaaaatgaaaaactgaaattcagtatcattgtgcggcttcctccgcttattgggcagaagatttgtagactttgggatcatcctatgagttctaacatcatttcgcggaaccacgtgacgcgactgcttcagaactataagaaacagcctcggaattctatgattaacaagtcatcgttcagtgtagaatttctgcctctgaactacttcattgaaattctgacagatatagagtcctccaatcaagccctgtatccttttgaaggacatgacaatgtggatgcagaatttatagaggaagcagctctgaaacacaccgcgatgcttttaggcttatgaaaaagaaaacgcaattggatctgctgctgccattttaatcttgctcattaaccttactcctttgagaattctttaacaatatttaaaattggtaacaaaaatagtttagccataattgtttagccatgtgagtttcaggttggtacacgttcagacagaactgctgtatcacattccaattttgaatagccagtgagcaatcaagtgtagagaaatgataaatggcctaagaaggcatacagtggcataaacgatgctcttcctagtagcttaataggccacaagctagtttctgttgccctctgaaataaaatatgctttaaaaatgtagggaccagtgcttagaaaagcaaaaactaggtgtgtcattgaaataataggcataaaaattaaatgttacataagacccctatttggaaaaagggtccttttaaaaactgaatttgtactaaatcagatttgccatgtccagtacagaataatttgtacttagtatttgcagcagggtttgtctttgtgaattcagatgaaacatatttatttttttttatttataaaaggttgatttaggaatattttgtcagtcattaaaaaccctgaacccataaaaaaaaaaaaaaaaaaaaaaaaaaaaaa

SEQ ID NO: 466 - protein, 268 aa, Homo sapiens
NLGPRLTPLLQEEDSHQRLLMGLMVSELKDHFLRHLQGVEKKKIEQMVLDYISKLLDLICHIVETNWRKHNLHSWVLHFNSRGSAAEFAVFHIMTRILEATNSLFLPLPPGFHTLHTILGVQCLPLHNLLHCIDSGVLLLTETAVIRLMKDLDNTEKNEKLKFSIIVRLPPLIGQKICRLWDHPMSSNIISRNHVTRLLQNYKKQPRNSMINKSSFSVEFLPLNYFIEILTDIESSNQALYPFEGHDNVDAEFVEEAALKHTAMLLGL

SEQ ID NO: 467 - DNA, 3079 bp, Homo sapiens
tcttaaacaaggagaagtgccagaaagcccggaagcaaggaaggaaagtgaccaagcatgtggcaaaatggatactgtggatattgcaaacaactctactttgggaaaacccaagaggaaaagaagaaaaaagaaggggcatggctggagcagaacgggaacgagaacgcagaaaaacaaccaacaaaatgataacagcaaagccgatggccagctggtctcgagtgaaaagaaggcgaacatgaatctgaaagacctttccaagattagggggagaaagagaggcaaacctggaacccactttactcagagtgacagagctccacagaaaagagtccgatcaagagcttcaagaaagcacaaagatgaaactgtggattttcaggctcctttacttccagtgacctgtggtggggtgaagggaattttacataaggagaaattggaacaaggaaccttggcaaagtgtatacagactgaggatggaaaatggttcacccccatggaatttgaaatcaaaggaggctacgcaagatcaaagaactggaggctgagtgtgcgctgtggcgggtggcccctacgacggctgatggaggaaggatctctacctaatcctccaagaatatattacaggaacaaaaagagaatactgaagtctcaaaacaatagctcagttgacccttgtatgagaaacttggatgagtgtgaggtgtgccgggacggaggggagctgttctgttgcgacacttgttcaagagtcttccatgaggactgccacatcccacctgtggaaagtgagaagtaagtgacatgcaggcacctctctttcatcctttaagggaccttccacctgccatgcgcactctccagcagaatgtctgcttgtgtctagatggggaaggagcaggttcatcgggtactgggacccagcagtgtgatccagagagcagtgggagacgctggcagcaggaggtaaatgctctctgtgctctcagggacacctcctctgatatgctgaggccagtgttggggacctttgcctacatactggtattgtcctttccttgaagttttgcagtagggtctcctgccccagggggttgaggaaaaaaaacaccagttgtttatattttgtgcttattcatacaagacaggaagcacggtcttaggcggatggaggcctgacgtccctggagttgaaagcccagtttctgacacacaggcctggcaggcaggactccttgtgctcccagcagctcagacagggaaaggatagtccccactcacggtgacaccaccttcctgaggcttccctcctgctgctaccactgatgcgagggaaaggccagtggctggagaccccatgtgcagttcttggatactctgggaggtgttcccctccctcccatgactgagcccatcagccattcctgaaggaagacagtggtagccacaggaacggtggccatttccaagctccctgccctctgctcacccatgtccaatctctcaggaccccgtggaattgcatcttctgcaggatgaaggagtctccgggaagccaacagtgttgtcaggaatctgaggtcctggagaggcagatgtgtcctgaggaacagttggtaaatcagatgcaaaccccaagccttctcctttcccctcacacgtgagaaccatgaacaagcgcaagggcaggggaatgtactgaaaggagcctgctctaccgcgccacacttcaatggcactgatagaacaccacaccttgtttgcacaaaaaataactcagccatgacatgtctgtttccaagagccacacatgttagagaaacttgaggaagaagggtgtgagtcgtgtgctgtgtctcatgcatgtgggctcattctctccaagctgcttttcatttacggcctctttcttttgcagaaatgtgagttcctcctcttgaaagtctattgctgttctgagagctccttttttgccaagattccatactattattatattagagaggcgtgtcaaggcctgaaggagcccatgtggttggataaaatcaagaaaaggctgaatgagcacggttacccccaagtggaggggtttgtacaagacatgcgcctcatcttccagaaccacagggcctcttacaagtataaggattttggccaaatgggacttagactggaggctgaatttgagaaggatttcaaggaagtgtttgctattcaggaaacaaatgggaacagttgactggtttagtggatgctgaaggccttcaggaaatatgctactggttgccactgacttcaaactgagagcacttgggaaatagcacatgcagggagaggcttttctctgagcctccctcatccgcccaaaaacaaatcctcaaaagaaatttgatcatcatgaatcccatccccaagaatctcatcaaccagggaagaggaactgagatcacagggaaggagattggaggtgataccagcacagacagactctcacctcttctcctgaggtctgctccagacaacatttattactcacaagacctttttcctccgttttttttttgagatggagtctcacacagtcacccgggattggaatgcaatggcgcgatctcagctcactgcaacctctgcctcccggattcaagtgattcccctgtctcagcctcccaagtagctgggattacagtgcctgccaccatgcccagctaattttttgcatttttagtagagacggggtttcactatgttggccaggctggtctcgaactcctgacctcatgagccgcccgccttggcctcccaaagtgctgggacgtgacaggagtgagccaccacacctggccactcgcaagaccttttatctgaaaaccagccaagctttattcacgacacacttcttcccttcactctcccacttctgtggtcaactccctgcagaactcccaaactgccgttcttttcgatagctcacgatggtgtatgagtgtcaatcatctgacccttcttggagtctcatatttcgtggaactcctgtgcaaacatatattattaaattttttttcctcctgtc

SEQ ID NO: 468 - protein, 245 aa, Homo sapiens
MDTVDIANNSTLGKPKRKRRKKKGHGWSRTGTRTQKNNQQNDNSKADGQLVSSEKKANMNLKDLSKIRGRKRGKPGTHFTQSDRAPQKRVRSRASRKHKDETVDFQAPLLPVTCGGVKGILHKEKLEQGTLAKCIQTEDGKWFTPMEFEIKGGYARSKNWRLSVRCGGWPLRRLMEEGSLPNPPRIYYRNKKRILKSQNNSSVDPCMRNLDECEVCRDGGELFCCDTCSRVFHEDCHIPPVESEK

SEQ ID NO: 469 - DNA, 3471 bp, Homo sapiens
gtgagccgtctacgaagcccgggcttggcctgggcgacactgagcggctttaaccggcggcgtccagccggctccgccagcgctgccgccgccctcgaggctccctctgactgaaggcgcgctgagcatcgcggcattaggggctcctggtccctcaaacatccagggaagccattttcagggactaggtactgacccccgcgagccgccacagccacagcccgcgctccgggccgaacgcccgagctcaagagctcccgagcttccgtcgggcggcggcctcacagctgggggccctgaggcggaaggcgcagccgctcagctgcggaccgggggcgtggcgagggcgcacaggttctgtttttcgccggcccggggccgctttcggtttcgtttcccgccggcgtctccaccctgcgagagccgcccgccagccagcgtccgccgccgtccgcgtcgcgccacccgcggtccgacgggagcaggcccagcggccatggcccaggccggcgtcgtcggtgaggtcacccaggtgctgtgcgcggccgggggcgccctggagttgcccgagctgcggcgccgcttgcggatgggcttgagcgccgacgcgctggagcggctgctgcggcagcgtgggcgcttcgtggtggcggtgcgggcgggcggcgcagccgcggccccggagcgcgtggtgctggccgcctcgccgctgcgcctgtgtcgcgcgcaccagggctccaagccgggctgcgtggggctctgcgcgcagctccacctctgcaggttcatggtctacggcgcctgcaagttcctgagagccgggaagaactgtaggaatagtcacagcttgacaaccgaacacaacctgagtgtgctgagaactcatggcgttgaccacctgagctataatgagctatgccaactcttgtttcagaacgacccctggcttttgccagaaatttgccaacattacaacaaaggagatggaccccacggctcttgtgcctttcaaaagcagtgcatcaagctccatatctgccagtattttttacagggggaatgcaagtttggcactagctgtaagagatcccatgatttctctaattctgagaatctggaaaaattggagaagttgggtatgagctcagacctggtgagcaggctgcctaccatttatagaaatgcacatgacatcaagaataagagctctgcccccagcagagtgcctcctctttttgtcccacaggggacttctgaaagaaaagacagttcaggttctgtgtccccaaacactcttagccaggaggagggtgatcagatctgtttgtaccatatccggaaaagttgtagctttcaagataagtgccatagagttcatttccatttgccgtatcgatggcaattcttggatagaggcaaatgggaggatttggacaacatggaacttattgaagaggcatattgcaatcccaaaatagaaaggatcctgtgctctgagtcagccagtacctttcactctcattgtctgaactttaacgccatgacttacggtgctacccaggctcgccgcctctccacggcctcctctgtcaccaaacctccacacttcatcctcaccactgactggatttggtactggagtgatgagtttggttcttggcaggaatatggaagacagggcacggtgcaccctgtgaccactgtcagcagtagcgacgtggagaaggcctacctggcctactgtacaccggggtctgacggccaggcagccaccttgaagttccaggccggaaagcacaactacgagttagatttcaaagccttcgttcagaaaaacctggtctatggcacaactaaaaaggtttgccgcagacccaaatacgtgtctccccaggatgtgacgaccatgcaaacctgcaataccaagtttccaggcccgaagagcatcccagactattgggactcctctgccctgccagacccaggctttcagaagatcacccttagttcttcctcggaagagtatcagaaggtctggaacctctttaaccgcacgctgcctttttactttgttcagaagattgagcgagtacagaacctggccctctgggaagtctaccagtggcaaaaaggacagatgcagaagcagaacggagggaaggccgtggacgagcggcagctgttccacggcaccagcgccatttttgtggacgccatctgccagcagaactttgactggcgggtctgtggtgttcatggcacttcctacggcaaggggagctactttgcccgagatgctgcatattcccaccactacagcaaatccgacacgcagacccacacgatgttcctggcccgggtgctggtgggcgagttcgtcaggggcaatgcctcctttgtccgtccaccggccaaggagggctggagcaacgccttctatgatagctgcgtgaacagtgtgtccgacccctccatctttgtgatctttgagaaacaccaggtctacccagagtatgtcatccagtacaccacctcctccaagccctcggtcacaccctccatcctgctggccttgggctccctgttcagcagccgacagtgagtgcacaggagtgttccaggcctttcacctgctctgccttgaaatggctatttgggcctttccttttctttttaaacagaaacttttaatgaactgttctcttaacattgacctctcaatgaagttatgttcttaatctcttgctaataatgatttttacttttaagtcacttttgggttcactagtggactaaccagaagtgattgtagttgagtccagttttgctttttaataatgtgttgaagttttagtttttactctttgttgactttgctgcttattggcaccagggacagagtttctagatacaattttatggattggttttaatttttatgagtttgtctctgcagtgattcggtttctcagagtctcatggcatcatagtttttccagaatgacacagtagccaccggtggatgacagcccacgggcggcacagtcacttctgcctgttgctctgacaccaacccaggcagctctgctgtggcttctcctgggctctggcattagttggtctgtgtcacattgtcagaacaggtggctgctgtgtggtgccatcgagtccctgctggttccccttgtcctgggagggtcacccattgcccaaggaagtgcatccacctggcaggtgacctggaggagtagcttccccgaggacccccaggcttggcctgtgattgcgcaaacccacatttcctaagcacactggacacccttcgagtgtgggttttaacatccctgtgagattgaatacttgtgccacacatgtcacaaaagagtatggaaataaaagaaaatttatccgaaaaaaaaaaaaaaaaaaaaaaaaaaaaaaaaaaaaaaaaaaaaaaaaaaaaaaaaaaaa

SEQ ID NO: 470 - protein, 701 aa, Homo sapiens
MAQAGVVGEVTQVLCAAGGALELPELRRRLRMGLSADALERLLRQRGRFVVAVRAGGAAAAPERVVLAASPLRLCRAHQGSKPGCVGLCAQLHLCRFMVYGACKFLRAGKNCRNSHSLTTEHNLSVLRTHGVDHLSYNELCQLLFQNDPWLLPEICQHYNKGDGPHGSCAFQKQCIKLHICQYFLQGECKFGTSCKRSHDFSNSENLEKLEKLGMSSDLVSRLPTIYRNAHDIKNKSSAPSRVPPLFVPQGTSERKDSSGSVSPNTLSQEEGDQICLYHIRKSCSFQDKCHRVHFHLPYRWQFLDRGKWEDLDNMELIEEAYCNPKIERILCSESASTFHSHCLNFNAMTYGATQARRLSTASSVTKPPHFILTTDWIWYWSDEFGSWQEYGRQGTVHPVTTVSSSDVEKAYLAYCTPGSDGQAATLKFQAGKHNYELDFKAFVQKNLVYGTTKKVCRRPKYVSPQDVTTMQTCNTKFPGPKSIPDYWDSSALPDPGFQKITLSSSSEEYQKVWNLFNRTLPFYFVQKIERVQNLALWEVYQWQKGQMQKQNGGKAVDERQLFHGTSAIFVDAICQQNFDWRVCGVHGTSYGKGSYFARDAAYSHHYSKSDTQTHTMFLARVLVGEFVRGNASFVRPPAKEGWSNAFYDSCVNSVSDPSIFVIFEKHQVYPEYVIQYTTSSKPSVTPSILLALGSLFSSRQ

SEQ ID NO: 471 - DNA, 7912 bp, Homo sapiens
ggaaattattagatgaattgtcagacccagaatcttcaaaacttattggagaagtgtttaatattgtgagccaacagtctactgctcgacctggctgcattattgaactcgacgcaataaccaaccaatgtggctcaaatacacagttgcttcatgtgtttcaagaagacttcattataggatataaaccacataaggaagatatggagaaaaaggaaacagaaatattttttcagccatcacaaggataccgcccaccaccattttcagaaaagttctttctagtagtaattgagaaggacagcaataataactctattctgcatatgtggcaccttcatcttaaatctgtacaagcatgtttagctaaagcttcagaaggggcttcctctgagagtctactttcagtccctggacagaagaatgtagattcttctccagaaacctctcctagtgtgagccccatgccacattcttcatcaattgccaatcttcaaactgccagtaaacttattctgagttctagactggtgtatagccaaccccttgatctcccagaatcagttgaagtaataagagcaacgccttcagcaggccatctgagttcttcttcaatttatccagtgtgccttgcaccttatttagtggttacaacttgttctgacaataaagtacgcttctggaaatgttgtatggaagccaacccagagtgtaataaaagtgatgagaaagaaatttatcattggaagagatggcctttgatgaatgatgaaggagaagataatagcagtacagtgagcattgtgggaagaccagttgctgttagctgttcatacacaggtcgccttgcagtggcttataagcagcctatccaccataatggttttgtttctaaagaattttccatgcatgtttgtatatttgaatgtgaatctacaggaggatcagagtgggttttagaacaaacaattcatcttgatgatttggttaaggttgggagtgtacttgattcaagggtcagcgtcgacagtaatctgtttgtgtatagcaagtcagatgcactcttgagcaaggatagatatcttattccgaatatcaaacatttagtacatttggactgggtatcaaaagaagatggctcccacattcttacagtgggagtcggtgcgaatatcttcatgtatggaaggctttcaggaattgtgactgagcaaaccaacagtaaggatggagtagctgtcatcactttaccactaggtggtagtatcaagcaaggagttaagtcaagatgggttcttcttagatctatagacttggtatcttctgttgatggtactccttcactgcctgtttctctctcttgggtaagagatgggatattggtggtaggaatggattgtgaaatgcatgtatatgcacagtggaagcatgctgtcaaatttggagacactgaagctgatagtcctaatgcagaagaggcagcaatgcaagatcattcgacctttaaatctaatatgctggcaagaaaaagtgttgttgaaggaacagctatttctgatgatgttttttgttcaccaactgtaattcaagatggtggcttatttgaggctgcacatgtactttcccctactcttccacaatatcatccaactcagctgttagaattgatggatttagggaaagtgcgaagggctaaagccattctctctcatttagtaaaatgtattgcaggtgaagtagcaatagttagagatcctgatgctggagaaggaactaagcgacatctctctcgaactattagtgtaagtggcagtacagcaaaggaaacagtcaccgtaggaaaagatggtactcgagattatactgagatagattctatccctccactaccactatatgcattacttgctgcagatcaagatacatcctacagaatttcagaagaaagtacaaagataccacagagctatgaagatcagacagtaagtcaaccagaggatcagtattcagagctgtttcaaatccaggatataccaacggatgatattgatttagagcctgaaaagagagaaaacaaatcaaaagtaataaatctttctcaatatggaccagcttactttggccaagaacatgcaagggtactttcaagtcatcttatgcactcaagtctaccaggccttacccgtttggagcagatgttccttgtagctttggctgatacagtggctactactagtactgagcttgatgaaagcagagataagagttgctcaggaagagatacattagatgagtgtggtttgagatacttgttagctatgcgcctacacacatgccttttgacatcgctgcctcctttataccgagtgcagctacttcatcaaggtgtctctacatgccattttgcctgggcttttcattctgaggctgaagaagaactgattaatatgattccagcaattcagagaggggacccccagtggtctgaattaagagctatgggcatagggtggtgggtgaggaacattaacacgcttcgaagatgcattgaaaaggttgccaaagcttcttttcaaaggaacaatgatgccttagatgctgcactattctacctttcaatgaagaagaaagcagtagtgtggggtctgtttaggtcacagcatgatgaaaaaatgacaacatttttcagccacaactttaatgaagatagatggcgaaaagctgctttgaaaaatgctttttccttacttggaaaacaacgctttgaacaatcggctgcttttttcttgctagctggttcattgaaagatgccatagaggtatgtcttgaaaaaatggaagatattcagctagccatggttattgcccgtttatatgaatctgaatttgagacttcatccacttatatatccatcctaaatcagaagattttgggttgccaaaaggatggctcaggattcagttgcaaaagattacatcctgatcctttcctgcgtagtcttgcctattgggtaatgaaagattacacccgagccttggacacattactggaacaaacaccaaaggaggatgatgaacatcaagttatcatcaagtcttgtaacccggtggcatttagtttttataactaccttcgaactcatcctttgctcattcgaagaaatcttgcctcccctgaaggaactttggcaaccttaggtctcaaaactgagaagaactttgttgataaaattaacctcatagaaagaaaattattctttaccactgcaaatgctcattttaaagttggatgccctgttttagccttggaggtactctccaaaattccaaaagtaaccaaaacatctgccttatctgcaaaaaaagatcagcctgacttcatttctcacaggatggatgatgtaccttcacattcaaaagctctgagtgatggcaatggaagttctggcattgaatggtcaaatgtaacttcatcacagtatgactggagtcagccaatagtaaaagttgatgaggaacctcttaatcttgattggggtgaagatcacgacagtgccttagatgaagaggaagacgatgctgttggtttagtgatgaaaagtacagatgccagggaaaaagataaacaatcagatcagaaggcctcagaccctaacatgttattaacacctcaggaagaggatgatcctgaaggtgatactgaagttgatgtgattgctgaacaactaaaattcagagcttgtttaaagatccttatgactgaattaagaacattggctacaggttatgaagtagatggaggaaaactcagatttcaactctataactggcttgaaaaggaaattgctgccttgcatgagatatgtaatcatgaatcagttattaaagagtattccagtaagacatattccaaagtagagagtgatctgctggatcaggaagaaatggtagacaaaccagatattggttcctatgagcgccatcaaatagaaagaagaagattgcaggccaaacgagagcatgcagaaagacgaaagtcgtggttgcagaaaaaccaagatctcctgagagtatttctcagctactgtagccttcatggggcccaaggtggtggtttggcttcagtaaggatggaactcaaatttttgctacaagaatcacaacaggaaactacagtaaagcagctccagtctccactaccactgcctaccaccctacctctgctttcagcaagtattgcgtcaacaaaaacagtcatagctaatcctgtattgtacttaaataatcacatccatgatatactttatactattgttcagatgaaaacaccacctcatcccagtattgaagatgtgaaggtgcacacacttcattcactagcagcatcactttctgcatcaatttaccaagcattatgtgacagtcatagctacagcagtcaaacagaaggaaatcagtttacaggaatggcttatcaaggacttcttttaagtgatcgtagaagactaaggacagaaagcattgaagaacacgcaacaccaaattcatctcctgctcaatggcctggtgtgagctcacttattaatcttttgagttcagcccaagatgaagaccagccaaaactgaacattttgctatgtgaagctgttgttgctgtttacttaagtttattgatacatgctcttgccacaaattcctccagtgaattatttcggcttgcagcccacccattaaataatcgaatgtgggctgctgtttttggaggcggtgtaaaacttgttgtgaaacctcgaagacaatcagaaaatatttcagcacctcctgtcctttctgaagacatagataaacaccgtaggagatttaacatgagaatgctcgtccctggaaggcctgtaaaagatgctaccccaccaccggtgcctgcagaaagaccatcttacaaagaaaaatttattcctcccgaacttagtatgtgggattattttgttgcaaagccatttcttcctttgtctgatagtggtgttatatatgattctgatgaaagcattcatagtgatgaagaagatgatgcctttttttcagatacacaaatacaggagcaccaagatccaaattcctatagctgggctcttctacatttgacaatggttaaactagcacttcacaatgtcaagaatttctttcctattgctggactggaattctctgagctgcctgtaacatcaccattaggtattgctgtgattaaaaacttggagaactgggaacagatcttgcaagagaaaatggatcagtttgaaggtccaccccctaactatatcaacacatatccaactgacctttcagtgggagctggaccagctattcttcgaaataaagcaatgctagaacctgaaaataccccattcaagtcccgggattcttctgcatttccagtcaaacgactttggcatttccttgttaaacaagaggtccttcaagagacatttattagatatattttcactaagaaaagaaagcagagtgaggttgaagctgatctgggctatccaggtggaaaggcgaaagtcatccataaggaatctgatatgatcatggcattttctgttaataaggcaaattgtaatgaaattgttttggcttcaacacatgatgttcaagaacttgatgttacttctctactggcctgtcagtcatacatatggatcggagaagaatatgacagagaatccaaaagttcagatgatgttgattatcgtggttccactacaactctttatcaacccagtgcaacatcctattcagcaagtcaggtgcatccaccttcatctctgccatggctgggcactggacagactagcactggagctagtgtgcttatgaaaaggaatctacataatgttaagagaatgacttcacacccagtccatcaatactatcttacaggtgctcaggacggcagtgtacgaatgtttgaatggacgcggcctcagcaacttgtctgctttcgtcaagctggcaatgcaagagttactagattatattttaattcacaaggcaacaagtgtggtgttgcggatggagagggttttctgagtatctggcaagttaaccaaactgcatcaaatcctaaaccttatatgagttggcagtgccacagtaaagccacaagtgactttgcatttattacctcttcaagtctagttgccacatctggacactccaatgacaatagaaatgtttgcctctgggacacattaatatcacccggaaacagcctcattcatggtttcacgtgccacgatcatggtgccacggtactgcagtatgcacccaaacagcaactcctaatctcggggggtaggaaaggacacgtctgcatttttgacatcaggcaaaggcagctcattcacacgttccaggcccatgactcagctattaaggctctggccttggatccctatgaggaatattttaccacaggttcagcagaaggtaacataaaggtttggagattgacaggccatggcctaattcattcatttaaaagtgaacatgctaagcagtccatatttcgaaacattggggctggagtcatgcagattgacatcatccagggcaatcggctcttctcctgtggtgcagatggcacgctgaaaaccagggttttgcccaatgcttttaacatccctaacagaattcttgacattctataaagattggggttttatttttatatacatttcagttaaaaggcacactacagtcatcactaggcaattctgctttctaagcagttgtattgaaaacagagaatctctgtgtagaatttgaatatgacccaagctgagtattatctaaacaggttggtggaatgaatgcgcatgtaccttattatgctgacatactaaaaaaaataaaacctagtattgtatgaaggatagctattctttacagcatttagcaaacctgattcagaaaacatttgagattagcaaattagtaacttgaaataatgaaaaggacgtttataccaaattaaggaagaaaatgttgctgatttgggtttttcttcctgttcttaccactgactgaagcatgcctgcagtctcctcctctgttgaatgaaggataatcataaggtgtttgttaggagcgctagaccacctggaaaactttcttagctgtggagcagtgcgcagtgaccagttctctgctgtgagaggccgtttccattctttcctgctgaatatttttcctgttagtgtttatactgagctagtactgtaacttgcaaatgagtgcaaatttaaatgcaatgttttactcacaatttgcacattcacattttttggactgctagtttttctatttaaatatttgccttcatgttaggaatgtactatgtgaacatgacatatttgtagttaaccaaacacaccttcttagtccagtttagtactttttcttttcgtgtattcaaggttaaacacccaaacatttaaggatatgttgaaactacaccaatagagcatttcatatcataattaaaatgaatgttaggcttcttgtggccagttaatagttgatgagattggtgacattatttattgccacagcctattgtataaactatgcagagttaaatatttgcttgtaaaatattagccaatgttgtcattattttgatgtatttccttggttatgaccaaaaatatgttgagatactgaaactaatgtctgtgtgtttaaatgtttaccagcaaattgtcttatcatgttaatgagaatgttcaatgcctgtgtggtaaatagtaaatacaatggcataaaagtaactttctctgaagatgtgatgttcaggctgtgaaatatatatgtaaaagaaaaataaatgttatttgttagagtt

SEQ ID NO: 472 - protein, 2237 aa, Homo sapiens
KLLDELSDPESSKLIGEVFNIVSQQSTARPGCIIELDAITNQCGSNTQLLHVFQEDFIIGYKPHKEDMEKKETEIFFQPSQGYRPPPFSEKFFLVVIEKDSNNNSILHMWHLHLKSVQACLAKASEGASSESLLSVPGQKNVDSSPETSPSVSPMPHSSSIANLQTASKLILSSRLVYSQPLDLPESVEVIRATPSAGHLSSSSIYPVCLAPYLVVTTCSDNKVRFWKCCMEANPECNKSDEKEIYHWKRWPLMNDEGEDNSSTVSIVGRPVAVSCSYTGRLAVAYKQPIHHNGFVSKEFSMHVCIFECESTGGSEWVLEQTIHLDDLVKVGSVLDSRVSVDSNLFVYSKSDALLSKDRYLIPNIKHLVHLDWVSKEDGSHILTVGVGANIFMYGRLSGIVTEQTNSKDGVAVITLPLGGSIKQGVKSRWVLLRSIDLVSSVDGTPSLPVSLSWVRDGILVVGMDCEMHVYAQWKHAVKFGDTEADSPNAEEAAMQDHSTFKSNMLARKSVVEGTAISDDVFCSPTVIQDGGLFEAAHVLSPTLPQYHPTQLLELMDLGKVRRAKAILSHLVKCIAGEVAIVRDPDAGEGTKRHLSRTISVSGSTAKETVTVGKDGTRDYTEIDSIPPLPLYALLAADQDTSYRISEESTKIPQSYEDQTVSQPEDQYSELFQIQDIPTDDIDLEPEKRENKSKVINLSQYGPAYFGQEHARVLSSHLMHSSLPGLTRLEQMFLVALADTVATTSTELDESRDKSCSGRDTLDECGLRYLLAMRLHTCLLTSLPPLYRVQLLHQGVSTCHFAWAFHSEAEEELINMIPAIQRGDPQWSELRAMGIGWWVRNINTLRRCIEKVAKASFQRNNDALDAALFYLSMKKKAVVWGLFRSQHDEKMTTFFSHNFNEDRWRKAALKNAFSLLGKQRFEQSAAFFLLAGSLKDAIEVCLEKMEDIQLAMVIARLYESEFETSSTYISILNQKILGCQKDGSGFSCKRLHPDPFLRSLAYWVMKDYTRALDTLLEQTPKEDDEHQVIIKSCNPVAFSFYNYLRTHPLLIRRNLASPEGTLATLGLKTEKNFVDKINLIERKLFFTTANAHFKVGCPVLALEVLSKIPKVTKTSALSAKKDQPDFISHRMDDVPSHSKALSDGNGSSGIEWSNVTSSQYDWSQPIVKVDEEPLNLDWGEDHDSALDEEEDDAVGLVMKSTDAREKDKQSDQKASDPNMLLTPQEEDDPEGDTEVDVIAEQLKFRACLKILMTELRTLATGYEVDGGKLRFQLYNWLEKEIAALHEICNHESVIKEYSSKTYSKVESDLLDQEEMVDKPDIGSYERHQIERRRLQAKREHAERRKSWLQKNQDLLRVFLSYCSLHGAQGGGLASVRMELKFLLQESQQETTVKQLQSPLPLPTTLPLLSASIASTKTVIANPVLYLNNHIHDILYTIVQMKTPPHPSIEDVKVHTLHSLAASLSASIYQALCDSHSYSSQTEGNQFTGMAYQGLLLSDRRRLRTESIEEHATPNSSPAQWPGVSSLINLLSSAQDEDQPKLNILLCEAVVAVYLSLLIHALATNSSSELFRLAAHPLNNRMWAAVFGGGVKLVVKPRRQSENISAPPVLSEDIDKHRRRFNMRMLVPGRPVKDATPPPVPAERPSYKEKFIPPELSMWDYFVAKPFLPLSDSGVIYDSDESIHSDEEDDAFFSDTQIQEHQDPNSYSWALLHLTMVKLALHNVKNFFPIAGLEFSELPVTSPLGIAVIKNLENWEQILQEKMDQFEGPPPNYINTYPTDLSVGAGPAILRNKAMLEPENTPFKSRDSSAFPVKRLWHFLVKQEVLQETFIRYIFTKKRKQSEVEADLGYPGGKAKVIHKESDMIMAFSVNKANCNEIVLASTHDVQELDVTSLLACQSYIWIGEEYDRESKSSDDVDYRGSTTTLYQPSATSYSASQVHPPSSLPWLGTGQTSTGASVLMKRNLHNVKRMTSHPVHQYYLTGAQDGSVRMFEWTRPQQLVCFRQAGNARVTRLYFNSQGNKCGVADGEGFLSIWQVNQTASNPKPYMSWQCHSKATSDFAFITSSSLVATSGHSNDNRNVCLWDTLISPGNSLIHGFTCHDHGATVLQYAPKQQLLISGGRKGHVCIFDIRQRQLIHTFQAHDSAIKALALDPYEEYFTTGSAEGNIKVWRLTGHGLIHSFKSEHAKQSIFRNIGAGVMQIDIIQGNRLFSCGADGTLKTRVLPNAFNIPNRILDIL

SEQ ID NO: 473 - DNA, 1949 bp, Homo sapiens
gctttttttttaatggcttttttatctgtgaacattcagataagtggattttcaagtactggttggggatgggaatcgtgcttttctttaaacttcagtttacgagatgctttgagagcgttaggcaaaagcagaaataaatatcaggagcaacggggaaagctttgtaaaagatcatggtggccactgttgcagctttgaagaatgagtgctggcttgaacagttctttgcctgcatcattggtagctgcactgaaaggaaaaaactttcaccttaagaatttgaaaaggaagaaacctgggctctggtcttcatggcatttagactgagatgcttaaacagaacagaagtaatacgcatttcctgccataggatagggaaaatgtaacaagctggttgctcttgaggttagaaaattgtctgtttctctgtggatgaagctggatttacttgaaaatggagagttggcttattgtttgaatattgggacatcaagctatctatagccaagtttcagtcgcaaccagttttccctttgtctggggtaaattcgatacaaaatgattctttttgaatcctgaatccataaattacacttttttttttcaaattcacaaaattcacagtggtgctgactgtgtaataaccactattgggaaacatcccgtaaacctgcctgttgccatgccaatggagtgactgaactggtgacatctgtttgagcatgctttgtgtggctggtagaatgccaccgttgtgcatacactttgtacatcaggggtgaagggagggttttctagattattgggggagggtaaaattgggatttttttgttgttccttttttgatggggtgtgggggtatagtactcagcttatgccctaaaataacatgtataaaaacccctgaagtattgtgtgggtgtgtacgtgtgagtgtgtgtttgtatacgtctggcaattaaagctttgtcttctggaacttagtgaattcttttctctttttcctccagaagtatttgttacaagatttgtaaataagagctctacttagtttgtttaccatgaacatgttgcagcaaaccttatgcatctaattcctacaaggttaaagaaaggcttttagacttgccaggttaagcaacagccaagttctcagtaattgtttgccttgatttatcttttagacttcattttgccagctctaaaactcccagtcttccttgattttagtccttaatcttttatgttctgagcaggaagggtaaaagacaggaacctgcttcactgtattaactagtccatgggctgagaccggggcatctcttttcttcatactgcaatgttgctagatacatgatcagacaccagagggttgggcattcttgcaataccttaacagtgctgaaatctgcagcatggtactaaggaagttaaagtttgaatgtaaccactttatttaaaaggtttttttctttaatttaaatgaaatggggttgaagtgaacatgattttgttgaccatgttcgtgaattacagatgcaacatgcattggtagaatcgtgtgatggtcttttgtgatacttaatttttacatatcccagtctctgtatgtatctgcatagacaaagaaaaaacaaactcctgctttgcttttattgaagggtttccaggactgcgtgtctgctcctgagctctgttttaagtatgtgtatcctttgcttgtattttgtattaaaaaaataagaaaaagaagcctttattgttgagcatgttggcattgtcccctttatttttttctctttttgggacatatgaagcaagttattctttttctgtatctttttttcttttgtaaacttttttttgttttgtttaaaaatggctttataaaagggcttttataacccaaaaaaaaaaaaaaaaaaaaaaaaaaaaaaaaaaaaaa

SEQ ID NO: 474 - protein, 82 aa, Homo sapiens
MHNGGILPATQSMLKQMSPVQSLHWHGNRQVYGMFPNSGYYTVSTTVNFVNLKKKSVIYGFRIQKESFCIEFTPDKGKTGCD

SEQ ID NO: 475 - DNA, 2522 bp, Homo sapiens
gtttcctaatctggtttcgtctgcttggttcatctgtgtgcgatggctccggactcggatcccttccctgaagggccgctcttaaagctgctacccttagacgctagagaccggggcacccagcgctgccgcctgggcccggccgccctccacgccctgggcgcgcgcttgggctcggcagtgaagatctcgctacccgacggcggctcctgcctctgcactgcctggcctcggcgggacggagcggacggctttgtgcagctggacccgctgtgcgcgagccccggggcggcggtcggggcgtcgagatcccggaggagtctcagcctgaatcgcctcctcctagtgccctgtccgcccctgcggcgcgtcgccgtgtggccggtgttgcgagagcgggcaggcgcgcccggtgcccggaatacagccgcggtgctggaggcggcacaggagctgctgagaaaccgaccgatctccctgggccacgtggtggtcgctccgccaggcgctcctggcctggtggctgccttgcacatcgtcggcgggacgcccagtcccgatcccgctgggctggtcacccctcgtacccgcgtcagccttggcggggagcctccgtcggaagcccagccgcagcccgaggtgcccctgggaggtctttcggaggcggccgactcgctgcgggagctcctccgcctcccgctccgctacccgcgcgccctgaccgcgctgggcttagcggtgcctcgcggggtgctcctggcggggccccccggagtgggcaagacccagctggtgcaggccgtggcgcgcgaggcgggcgcggagctgctggcagtcagcgccccggcgctgcagggttcccggcctggggagaccgaggagaacgtgcggcgggtcttccagcgcgcccgggaactggccagccgcggacccagcctcctcttcctggacgagatggacgccttgtgtccccagcggggcagtcgagcacccgagagccgcgtagtggcccaggtgttgacgctgctggacggcgccagtggggaccgcgaggtcgtggttgtgggagccactaaccggccggacgctctagacccagcgctgcgtagacccgggagatttgaccgagaggtggtcattgggactcccacacttaaacaaagaaaggaaattctgcaagtgattacctcgaagatgcccatctccagtcatgttgatttgggccttcttgcagaaatgacagttggctatgttggtgccgacctgacagcactctgtagggaggctgccatgcatgccctccttcatagtgagaagaaccaggacaatcctgtgattgatgaaatagacttccttgaagcttttaaaaatattcagccctcatcgtttcgaagcgtcattggattaatggatatcaagcctgttgactgggaggagattggtggccttgaagatgtaaaactgaagttaaaacagagcattgagtggcctctgaaattcccttgggaatttgttagaatgggcctgacacaaccaaagggagttctcctctatgggccccctggatgtgctaaaaccactctggtgagggccctggccacaagctgtcactgctctttcgtttcagtgagtggagctgatctgttttcaccgtttgttggagattcagaaaaagtgttgtctcagatatttcgacaagcaagagcaagcactccagcaattttgtttttggatgaaattgattcaatcttgggagctcgctcagccagcaagacaggatgtgatgttcaagaacgagttctttctgttctcctgaatgaattagatggtgttggacttaagacaatagagagaagaggaagtaaatcaagtcaacaggagtttcaagaagtttttaaccgaagtgtcatgattattgcagcaacaaatagacctgatgtgttagatactgctttgttacgacctggaagattagataagatcatctatatcccacctccagatcacaagggcaggctttctattttaaaagtctgtacaaaaaccatgccaatagggcctgatgtctccttagaaaacctcgcagcagaaacctgttttttttctggagctgatcttagaaacctctgcacagaagctgctttgctggctctgcaagaaaatggactagacgcaactacagtgaaacaagagcactttctaaaatcacttaagactgtaaaaccgtcgttaagttgcaaggacttggctttatatgaaaacttatttaagaaagaaggattttctaacgtggaaggtatttaaaaatcaccttaaactcttgttcagttcacattaattgaaatgtgaacttgcctgtcgtttgcaacttcacacttttagaatttgtgtttatatttcctgtaagtgaataaataaaacaaaacaaaacaaaaaaaacttgtgcctgataagctaaggctcatttatttttaaaaggcatattaaataaaatactgtaatttaggaaaaaaaaaaaaaaa

SEQ ID NO: 476 - protein, 753 aa, Homo sapiens
MAPDSDPFPEGPLLKLLPLDARDRGTQRCRLGPAALHALGARLGSAVKISLPDGGSCLCTAWPRRDGADGFVQLDPLCASPGAAVGASRSRRSLSLNRLLLVPCPPLRRVAVWPVLRERAGAPGARNTAAVLEAAQELLRNRPISLGHVVVAPPGAPGLVAALHIVGGTPSPDPAGLVTPRTRVSLGGEPPSEAQPQPEVPLGGLSEAADSLRELLRLPLRYPRALTALGLAVPRGVLLAGPPGVGKTQLVQAVAREAGAELLAVSAPALQGSRPGETEENVRRVFQRARELASRGPSLLFLDEMDALCPQRGSRAPESRVVAQVLTLLDGASGDREVVVVGATNRPDALDPALRRPGRFDREVVIGTPTLKQRKEILQVITSKMPISSHVDLGLLAEMTVGYVGADLTALCREAAMHALLHSEKNQDNPVIDEIDFLEAFKNIQPSSFRSVIGLMDIKPVDWEEIGGLEDVKLKLKQSIEWPLKFPWEFVRMGLTQPKGVLLYGPPGCAKTTLVRALATSCHCSFVSVSGADLFSPFVGDSEKVLSQIFRQARASTPAILFLDEIDSILGARSASKTGCDVQERVLSVLLNELDGVGLKTIERRGSKSSQQEFQEVFNRSVMIIAATNRPDVLDTALLRPGRLDKIIYIPPPDHKGRLSILKVCTKTMPIGPDVSLENLAAETCFFSGADLRNLCTEAALLALQENGLDATTVKQEHFLKSLKTVKPSLSCKDLALYENLFKKEGFSNVEGI

SEQ ID NO: 477 - DNA, 4701 bp, Homo sapiens
gactgcctgcttgcaggctgtgtcacagaagagaacatggcagaacagtatgctcaggagttgataccaagttgaaattcactcttgagccatctttaggtcaaaatggttttcagcagtggtacgatgctctcaaggcagttgccaggctatccacaggaataccaaaggaatggaggagaaaggtttggttgaccttggcagatcattatttgcacagtatagccattgactgggacaaaaccatgcgcttcactttcaatgaaaggagtaatcctgatgatgactccatgggaattcagatagtcaaggaccttcaccgcacaggctgtagttcttactgtggccaggaggctgagcaggacagggttgtgttgaagcgggtgctgctggcctatgcccgatggaacaaaactgttgggtactgccaaggctttaacatcctggctgcactaattctggaagtgatggaaggcaatgaaggggatgccctgaaaattatgatttaccttattgataaggtacttcccgaaagctatttcgtcaataatctccgggcattgtctgtggatatggctgtcttcagagaccttttaagaatgaagctgccggaattatctcagcacctggatactcttcagagaactgcaaacaaagaaagtggaggtggatatgagcccccacttacaaatgtcttcacgatgcagtggtttctgactctctttgccacatgcctccctaatcagaccgttttaaagatctgggattcagtcttctttgaaggttcagaaatcatcctaagggtgtcgctggctatctgggcaaaattaggagagcagatagaatgttgtgaaacagcagatgaattctacagcaccatggggcgccttacccaggagatgctagagaatgatcttctgcaaagccatgaactcatgcagactgtttattccatggctccgttccctttcccacaattggcagagttgagggaaaaatacacctacaacattacaccgttcccagccacagttaaacccacctcagtttctggacgacatagtaaggccagagacagtgatgaagagaatgacccagacgatgaggatgctgtcgttaatgcagtggggtgtcttggaccttttagtgggttcctggctcctgaactgcagaagtaccaaaaacaaattaaagagccaaatgaggagcagagtctgagatctaataacattgcagagctgagtccaggagcaatcaattcctgtcgaagtgaataccatgcagcttttaacagtatgatgatggaacgcatgaccacagatatcaatgcactgaagcggcagtactctcgaattaaaaagaagcaacagcagcaggttcatcaggtgtacatcagggcagacaaagggccagtgaccagcattctcccgtctcaggtaaacagttctccagttataaaccaccttcttttaggaaagaagatgaaaatgactaacagagctgccaagaatgctgtcatccacatccctggtcacacaggagggaaaatatctcctgtcccctacgaagaccttaagacgaagctcaactccccgtggcgaactcacatccgagtccacaaaaagaacatgccaaggaccaagagtcatccgggctgtggggacaccgtagggctgatagatgagcagaacgaggccagcaagaccaatgggctgggggcagcagaggcattcccctctggttgtacagcgacagctgggagagaaggcagcagccctgaaggcagtaccaggaggacgatcgaggggcagtctccggagccggtgttcggagatgctgatgtggatgtgtctgcagttcaggcgaagttgggagccctggaactgaaccagagggatgctgcagctgaaactgagctcagggtgcacccaccctgccagcggcactgcccagagccgccgagtgcacccgaagaaaacaaagccaccagcaaagctccccaaggcagcaactcaaaaacccccatctttagcccttttcccagcgtcaagcccctgcggaaatctgctactgccaggaacttgggattatatggccctacagaaagaaccccaactgtgcactttcctcaaatgagtaggagcttcagcaaacccggcggtggaaacagtggcactaaaaaacgatgatgtctccccgaaactttgtatctggactcaccttttcacagtagtataagggttgcagctgaatggctctaaaagagttttatttgtccagtgaaaatgaataggttcagggatgagcaacagcccataaaaaatgggaactggaagttttataataggagttagaacagggctgttttcccagctacttgctaactgacgaagtggattcttgtggcaaaataaatattgtggttttatagtgtgaagttttcccaatttttcattgtgagctgtttaaaaaagactatatctagattgttaactctcgtccatccttctgttctgggggccttcagagtccctgtgacagcacccccaaaccttccagttctctgggtgttactaatactcaagcatgcacataccagcttgctaggacagaaactgtaaaaagaaagtaagtttcttcgttacaaaaaacttcctgattttccttttcatgctttacggaggggattgtgtcgtgtgagatttcccacagtaccagtttcaaatttttttttattcttatgctaaatcataggagaaaaatctagatggcctttctttaactgtctatttctacctgcaaaatgaagaaaacctttcatctgttgaaatttcaatcgataacccagctgaagatcttatgcacaggacacacttggcatatgctttacgcagttgctccggacagcttgctcgcgccactgagcttttcctgaggtttgtgttcgcctctcaaggagagctttgatcctcagtggtacggatgacttgatgggctccatgcggagcctggcctgcatcccccaccacacagctcactcacccaccagctctagactgcagacgcacaaggcctctgctcagaagccagaacacagcacctgtgactctgttacttgaattttgtgctttttgattggagtcctttgttgagtactttgttaattgaacactgcctttctctggagaaggccccagtgctttctagctccctctcactcctgccctttctagctctctctcacccagcgggtcagggatagcacctcttgtctccactatgcagatgggaactctgagccacacagaggtgaagtagcacttcagttactcaaggtcagtactctcggtattccaagtgacttagccacatttccttcagtgcaataggtgggtttaatgctctttgtacacagatgtattggctacatagcgtgtaaaaaccaagactgggaagccattcactaaaatccctcctgactcaaaggacctgtctccagatggtacagagtcccttgatggcattttacaaaaccagctctgacttccttatcctgaacagggagtttattttaaaaatgcttcatgcacctgttatttggctgaacagaaggctcactcctcaatccccttctcctcgccatcattagaggaatagactcagccttcatgtttgtctctggaagacgattggcgatacttgcaggaatattgttgatgcagccaatattaatttgagctaatggattgttaattctgaaacgaaaactgtaactgtagagcaggcttttactatgagaggtactactttttataatagagaatgtggttgtgtgggctttttttgaacagaaaacacaacaatgacctataccgtgagaaaagccattttatcttcttcgtggtatttttacccccaaaggaactgaagatggaaaatatgactaataagttattgcagttttggtcttgaattctgtgccatctgaagttagcatccagcttcttaaaaagcagccacgcctacagcctgttttttgggaaggctgtaggtggagagatgggcttattttgcataccaccctcagggcccagagacccactgcattttccaaagttaagcatgacaccattttcttccatcagctaaactttacagataatagtgtttccacctcatatccttttctttgccccttctcaaatgagtcagaatagtcatgttccccttgagggatgtctgacttgaatggagaattgttctttcctctcttgaatcagctcactagctccctgatggtctgggttcaaggaaatggttaatgaggtagaggccacttatacaagtccttgggattgtaccattgctgtccacaaacttagtatcaacaacacatgctgtgccctgtgaacactctcctctcacctatttccagggttggtcttcctgagaaggggatggatgaggtaacacacagtttgggatacgtatctgttgaatgaatgaataagtgaaaggataatagtcctctgaggtaaaaatggccttgtcagaattttgaaaatccaacagattcctattaaagcactctgtgtaccaataacatgcatgcattgtaccaagtaatcacaatgtgaattggtcaatttatgagccttgcctactttagaaaataaagaaacctgcagtagcctctaccac

SEQ ID NO: 478 - protein, 728 aa, Homo sapiens
LPACRLCHRREHGRTVCSGVDTKLKFTLEPSLGQNGFQQWYDALKAVARLSTGIPKEWRRKVWLTLADHYLHSIAIDWDKTMRFTFNERSNPDDDSMGIQIVKDLHRTGCSSYCGQEAEQDRVVLKRVLLAYARWNKTVGYCQGFNILAALILEVMEGNEGDALKIMIYLIDKVLPESYFVNNLRALSVDMAVFRDLLRMKLPELSQHLDTLQRTANKESGGGYEPPLTNVFTMQWFLTLFATCLPNQTVLKIWDSVFFEGSEIILRVSLAIWAKLGEQIECCETADEFYSTMGRLTQEMLENDLLQSHELMQTVYSMAPFPFPQLAELREKYTYNITPFPATVKPTSVSGRHSKARDSDEENDPDDEDAVVNAVGCLGPFSGFLAPELQKYQKQIKEPNEEQSLRSNNIAELSPGAINSCRSEYHAAFNSMMMERMTTDINALKRQYSRIKKKQQQQVHQVYIRADKGPVTSILPSQVNSSPVINHLLLGKKMKMTNRAAKNAVIHIPGHTGGKISPVPYEDLKTKLNSPWRTHIRVHKKNMPRTKSHPGCGDTVGLIDEQNEASKTNGLGAAEAFPSGCTATAGREGSSPEGSTRRTIEGQSPEPVFGDADVDVSAVQAKLGALELNQRDAAAETELRVHPPCQRHCPEPPSAPEENKATSKAPQGSNSKTPIFSPFPSVKPLRKSATARNLGLYGPTERTPTVHFPQMSRSFSKPGGGNSGTKKR

SEQ ID NO: 479 - DNA, 4098 bp, Homo sapiens
atgctgcaaatgccgaagttaaatgaaatacctccggggagggcaggccgcagggaggctcggggggagggaagatggcctggacaaacaggtcctgaagctgcgaggctggagtggagggcgcaggggcaggcgggcggcgccagagctccatgggacagctggggaagctccaggctacctacacaacctggcccaggctggtcacggtgtcccccctccctgctctgtgccctctccttccagaaatccaccatggagagtaaggatgaggtcagcgacaccgacagtggcatcatcctgcagtctggccccgacagcccggtctccccaatgaaggagctgacccatgcagtgcacaagcagcagagggccctggaagcgaggctggaggcctgcctggaggagctgaggagactctgccttcgggaagcggagctgacgggcaccttgccagcggagtatcccctcaaaccaggggaaaaggcccccaaggttcgccgcaggatcggagcggcttacaaactggatgactgggccttgcacagagaggaccccctaagcagcctggagcgccagctggccctgcagctgcagatcacagaggcagcccgtcggctgtgcctggaggagaacctcagcaggcaggctcggcggcagcggaagcactccatgctgcaggaggagaagaagctgcaggagctccagcgctgcctggtcgagcggcggcgcaatagcgagccacctccggctgctgctctccccctgggccgagagctcagtgcctctgatgacagctccctgtcagatgggctcctcctggaggaagaggaatcccaagtgccaaaacctcctccagagtctccagccccaccttctcggcctctcccaccccaaacccttgagggtctgcagccaacaggacctgaggctgggagcccagaacgggctccagtccagaacagcccctggaaggaaaccagcctggaccacccctatgagaagcccaggaagtcttctgagccctggagcgagtccagcagcccagccaccacaccacaggatgggcccagtgcctccagcctgtggcttctggagcctgcctcctaccacgtggttcccatccgtggtgttcctggccagtggcagggccgcaccagtgccccagccacccctgagatacaggggaggaggggccagtcgcagtctctgagggtggattccttccgggcgggtcctgagggccgaggtcgcagcgcctttccccgccgccgccccactcactacacggtgacagtgccagattcctgctttcccgcgaccaagcccccgctgccccacgccgcctgccactcctgctcagaagacagtggctctgacgtctccagcatctcccaccccacttcgccgggcagcagcagccccgacatctcctttctgcagcctctctcccctcccaagacccatcgtcaccgcggggcctgggtcccagccggcagcagagagctggtcgcccaccaccccaagctactgctgccgcctggctatttcccggcggggcggtacgtggtggtggctgagagccccctgccgcctggcgagtgggagctgtgccgcgcagccccgggccctgcttacgaggaggagggcactcccctgcgctaccagcgtctggtgccctcccgcagccgcatcgtgcggacgccctccctgaaggacagcccggcaggccgggggctcagcaaggccgccgtgtccgaggagctcaagtggtggcacgagcgtgcacgcctccggagcacccgaccccactcactggaccgccaaggagctttccgggtcaggagcctgccccttgggagagagggcttcggacgagccctgggaccccgggcacaggtgcccacagtttgtgtgctgtggagatcgcctgatggggcccctgtgcaagtctttgtacctgaaaaaggagagatcatcagccaggtgtaactctgcgccccacgctggaaaaaactgtttcatagaggggctgggctgagacccccccacccctgagtgcctctttcagctcccccatccccatcgcaggccgatgacctggagctaagaccttttattattttttttttacacgacttttttcagaagccctgacctaaggatttatatatgtggattgtcctcaatacccctgtgatatgattatgttttatcccccagagtttggcctactggacttaaggccttgcctgtctgactgacagcctctatctccttatataagacaagtggcaggggacgagtgaagcagagtgagccaccttgggagttctccaacgctctgtgctctggttctaagaaattccctggggaactgcccctggccctcctgtcccactattgctggaggctggacatggtacatactcatgcacatgactctcccccatttcccaggtctctgggtaccccagcctgggctgggggagaatctcttcccccttttctaatgtgctctgtgatgcacacaccaagtggtaggtcaaaggtcagtatatcccggtggtgtattgtcttgctagaccctgctattttcctgaccccctaaatcctctttagggacccagtcactataccctgtctatgccctgtgggctcccagacccctgagctttgagtcagtggcatcacagtttgtagcctcagggggtctggctgggggctggtccatgcttgtggttagtggacagcagccaccctttgacagctacctctggacatctcaagggcttgcagccccactgctccttctaacattttgtttgtttttgagatggagtctcgctctgtcgcccaggctggaatgctgtagcaagatttcggctcactgcaacccccgtctcccgggttcaagcgaatctcctgcctcagccttctgagtagctgggattacaggcaagcaccaccatgcctgctaattttttatttttagtagagatggggtttcatcatgttggccaggctggtctcgaactcctgacctcaagtgatccacctgccttggcctttcaaagtgctgggattacaggcatgagccaccgcacctggcccttctaacgttttttcatcatagtcccaaaaaccaatactttacaagtggtttttgaaaggcaccacttttgtggcatgttctggttgggagagggagtcacagttcctactccccccaccagctatgcttctgctctgagaaggtggttatttatacaaacatggacatactcactcccaagggctgatgagatgctgaattttctttgggggcattcattaattgtcccagctgcagcgactggagcaagtctggaagctgcctgtgctaagaccacccagctgtccctgggttctcatcctagggccttctttgcttccaggtcaggggacctgcttcaatgagaaagcaactgaattgaggctaggagaggtagggagagctgagttctgacttcacctgtgcagaactctctgcccccatgttacctggactggaacagactgtgaatatagcagaaggttccaagaactctggtgtctgacctagaagaggcacagttctctctactggaaagaaaacgatgtagccgattgcacaagggtgccaagggaagacccaggatggcccatcaaaggaacctgggggaggatgcaggaggctgaagggatgcacctggcatttctctcactgtgctcttaccgcatcagcaacccccaacttttgggcctactctgccccccatgcgtgaataccctgcttggatgctgtgcttttccggtttgtctctaagcccctttctccagggcatgttggtttccctggcctctcagtgtcctaactggagcccagagtgccttgttctgagccaggagacggctgagcactggccctccacacctaagcgtcctttacattaacttattggtcttgtataacacctggtgccattgccaagtggctgtgtcctcagctacagagctggaattgtgtggggtttagtgctaaatacttcaataaagtctgttttttgtgattggctg

SEQ ID NO: 480 - protein, 663 aa, Homo sapiens
MLQMPKLNEIPPGRAGRREARGEGRWPGQTGPEAARLEWRAQGQAGGARAPWDSWGSSRLPTQPGPGWSRCPPSLLCALSFQKSTMESKDEVSDTDSGIILQSGPDSPVSPMKELTHAVHKQQRALEARLEACLEELRRLCLREAELTGTLPAEYPLKPGEKAPKVRRRIGAAYKLDDWALHREDPLSSLERQLALQLQITEAARRLCLEENLSRQARRQRKHSMLQEEKKLQELQRCLVERRRNSEPPPAAALPLGRELSASDDSSLSDGLLLEEEESQVPKPPPESPAPPSRPLPPQTLEGLQPTGPEAGSPERAPVQNSPWKETSLDHPYEKPRKSSEPWSESSSPATTPQDGPSASSLWLLEPASYHVVPIRGVPGQWQGRTSAPATPEIQGRRGQSQSLRVDSFRAGPEGRGRSAFPRRRPTHYTVTVPDSCFPATKPPLPHAACHSCSEDSGSDVSSISHPTSPGSSSPDISFLQPLSPPKTHRHRGAWVPAGSRELVAHHPKLLLPPGYFPAGRYVVVAESPLPPGEWELCRAAPGPAYEEEGTPLRYQRLVPSRSRIVRTPSLKDSPAGRGLSKAAVSEELKWWHERARLRSTRPHSLDRQGAFRVRSLPLGREGFGRALGPRAQVPTVCVLWRSPDGAPVQVFVPEKGEIISQV

SEQ ID NO: 481 - DNA, 2381 bp, Homo sapiens
aagtggcaccagcacttccggtacggaaaactcgctgctgccccaacctggcttgacaggcttggtctctgcaagtggctctcagccccttcttctttcctgcctcaccttccaattcgtttgccgccgccgtcccgcagctgctgtttccggagttgccccttccccatgttccggggcaggagtccgcaaagcgaagatccgcccgccggttccccatcatgtccgaactgactaaagagctgatggagctggtgtggggcaccaagagcagccccggtctctcggacaccattttctgccgctggacgcaagggtttgtgtttagtgaatcagagggatctgcattagaacagtttgaaggtggcccctgtgctgttattgcacctgttcaggcatttcttttgaagaagctcctgttttcttcggagaagtcttcttggcgggattgttcagaggaagagcagaaggaactcctttgtcataccttgtgtgatattttagaaagtgcttgttgtgaccactctggatcatactgcttggtttcatggttaagaggaaagacaactgaggaaactgctagtatttctgggagtcctgcagagtctagttgccaagtggaacattcttctgccttggctgtcgaagagcttggctttgagcgatttcatgcattaattcaaaaaagatcgttcagaagtttaccagaattaaaagatgctgtcttggaccagtattcaatgtggggaaataaatttggagtattgctttttctgtattctgtattactgacaaagggcattgaaaacataaaaaacgaaattgaagatgcaagtgaacccttgatagatcctgtatatggacatggcagccaaagtttaattaatctcctgctgacgggacatgctgtttctaatgtatgggatggtgatagagagtgctcaggaatgaaacttcttggtatacatgaacaagcagcagtaggatttttaacactaatggaagctttaagatactgtaaggttggttcttacttgaaatctccaaaattccctatttggattgttggcagtgagactcacctcaccgtattttttgccaaggatatggctttagttgcccctgaagctccttcagaacaagccagaagagtttttcaaacctacgacccagaagataatggattcatacccgattcacttctggaagatgtgatgaaagcattggaccttgtttcagatcctgaatatataaatctcatgaagaataaattagatccagaaggattaggaatcatattattgggcccatttcttcaagaattttttcctgatcagggctccagtggtccagaatcttttactgtctaccactacaatggattgaagcagtcaaattataatgaaaaggtcatgtacgtagaagggactgcagttgtgatgggttttgaagatcccatgctacagacagatgacactcctattaaacgctgtctgcaaaccaaatggccatacattgagttactctggaccacagatcgctctccttcactaaattaatttgtctaagtatttataaggaagatcttaataacagatgttgaaagaaggagtcaagactggcaattggctggattaagctaaacactggtatcactgattaactgtaaataacaattaaaaacacattttcagtgtttatgatatgtttaaattatttgtcctaaagctttatgttaaagattatcctattttaccccttcgtgtgaaatttactagcaaaattaagctttcatcaaagttcatcacttttgcattcagatacttggtcatttacttaccaaattacaaacgcaatactacagcatttgtatattaagtatcacagttactattgataaactacttttgggttttatttcattgaggcactttttttattgtttgaatgattccggcttgtaatatatcagcctctacaatgaaatgcagaagagttcatttttctaagatctgtttttcattagaaatattgacaaataacacattgtcaacctggatcctttgacaatttacttaactctggcatgttcacaaaaagtagaaactctaagagaccattaccatttattcacagatgtataggggatgtattctaaaaactgacagaaaagagaatctgatagtcaacactgttaacttttactgtgtaattgccaaatacacttttccaaatttgtcccaacagccctgtaagccagctttcttctatatttataaacacgataaatgcatgagaagatctgttattacattagtatattacgttatttattatgatcctagttgatggcctaaataaacacctttttctttaactgt

SEQ ID NO: 482 - protein, 445 aa, Homo sapiens
MSELTKELMELVWGTKSSPGLSDTIFCRWTQGFVFSESEGSALEQFEGGPCAVIAPVQAFLLKKLLFSSEKSSWRDCSEEEQKELLCHTLCDILESACCDHSGSYCLVSWLRGKTTEETASISGSPAESSCQVEHSSALAVEELGFERFHALIQKRSFRSLPELKDAVLDQYSMWGNKFGVLLFLYSVLLTKGIENIKNEIEDASEPLIDPVYGHGSQSLINLLLTGHAVSNVWDGDRECSGMKLLGIHEQAAVGFLTLMEALRYCKVGSYLKSPKFPIWIVGSETHLTVFFAKDMALVAPEAPSEQARRVFQTYDPEDNGFIPDSLLEDVMKALDLVSDPEYINLMKNKLDPEGLGIILLGPFLQEFFPDQGSSGPESFTVYHYNGLKQSNYNEKVMYVEGTAVVMGFEDPMLQTDDTPIKRCLQTKWPYIELLWTTDRSPSLN

SEQ ID NO: 483 - DNA, 1906 bp, Homo sapiens
aatctgtggtttttgctcaaaactcagtctatctggatgcgttgaattatagacagatgtctggccgtgctggaagaagaggtcaagacctgatgggagatgtatatttctttgatattccattccccaaaataggaaaactcataaaatccaatgttcctgagctgagaggacacttccctctcagcataaccctggtcctgcgactcatgctgctggcttccaagggagatgacccagaggatgccaaggcaaaggtgctatcagtgctaaagcattcattgctgtccttcaagcaacccagagtcatggacatgttaaaactttacttcctgttttctttgcagttcctggtgaaagagggctatttagatcaagaaggtaatcctatggggtttgctggacttgtgtcacatttgcattatcatgaaccttctaatcttgtttttgtgagttttcttgtaaatggcctcttccatgatctctgtcagccaaccaggaaaggctcaaaacatttttctcaagacgttatggaaaagctagtattagtattggcacatctctttggaagaagatattttccaccaaagttccaggatgcacacttcgagttttatcaatcaaaggtgttccttgatgatctccctgaggattttagtgatgctttagatgaatataacatgaaaattatggaggactttaccactttcctacgaattgtttccaaactggctgatatgaatcaggaatatcaactcccattgtcaaaaatcaaattcacaggtaaagaatgtgaagactctcaactcgtatctcatttgatgagctgcaaggaaggaagagtagcaatttcaccatttgtttgtctgtctgggaactttgatgatgatttgcttcgactagaaactccaaaccatgttactctaggcacaatcggtgtcaatcgctctcaggctccagtgctgttgtcacagaaatttgataaccgaggaaggaaaatgtcgcttaatgcctatgcactggatttctacaaacatggttccttgataggattagtccaggataacaggatgaatgaaggagatgcttattatttgttgaaggattttgcactcaccattaaatctatcagtgtttccttgcgtgagctatgtgaaaatgaagacgacaacgttgtcttagcctttgaacaactgagtacaactttttgggaaaagttaaacaaagtctaaaaacaaagtctatgcaaaccactcaaaaataattccatagtagtttttcaggtcacgtttttgattcttatgcttcttgccagaaatacattatgataaagtggaaatacattacgatgaagtggaaagagcaaacactttggaatcaaacagagttgcaatcaaacctgccatgttctgtcatgaatactcacaaattatttagtatacctgaatcttggtttctttttataactgagtaataatggttacatctcaggtagtttgaggattgactaaaaaaatgcgagaatgttgtatgtgactgaataacaatttttactctgcgaagccaaagtaaatataatattatcagtaactttatccccagtgtcagtatttataaaatgtttattaaggctagaaaaaatgaatacaatatcctgaaggtgaaatatattctcttcaattagcataaatatgatttacataagttagctatacagctattgagatagtactttctagtaaacttaaactactttttaaacatacattttgtgttgatttaacaaaaatatagagaatgatttgctttattgtaattgtatataagtgactggaaaagcacaaagaaataaagtgggttcgatctgtttaccaaaaaaaaaaaaaaaaaaaaaaaaaaaaaaaaa

SEQ ID NO: 484 - protein, 391 aa, Homo sapiens
MSGRAGRRGQDLMGDVYFFDIPFPKIGKLIKSNVPELRGHFPLSITLVLRLMLLASKGDDPEDAKAKVLSVLKHSLLSFKQPRVMDMLKLYFLFSLQFLVKEGYLDQEGNPMGFAGLVSHLHYHEPSNLVFVSFLVNGLFHDLCQPTRKGSKHFSQDVMEKLVLVLAHLFGRRYFPPKFQDAHFEFYQSKVFLDDLPEDFSDALDEYNMKIMEDFTTFLRIVSKLADMNQEYQLPLSKIKFTGKECEDSQLVSHLMSCKEGRVAISPFVCLSGNFDDDLLRLETPNHVTLGTIGVNRSQAPVLLSQKFDNRGRKMSLNAYALDFYKHGSLIGLVQDNRMNEGDAYYLLKDFALTIKSISVSLRELCENEDDNVVLAFEQLSTTFWEKLNKV

SEQ ID NO: 485 - DNA, 5577 bp, Homo sapiens
ggcaaccatggcgggaggaatgaaagtggcggtctcgccggcagttggtcccgggccctggggctcgggagtcgggggcggtgggacagtgcggctactcttgatcctctccggctgcttggtctacggcacagctgaaactgatgtaaatgtggtcatgcttcaggaatcccaagtttgtgaaaagcgtgccagccaacaattctgttacacaaatgtgcttatcccaaaatggcatgatatatggacacggatacagatccgagtaaatagttccagattggttcgagtcacccaggtggagaatgaggagaaactgaaggagctagagcagtttagtatctggaactttttttcctcctttttaaaagagaaattgaatgacacctatgttaacgtgggtctatacagcacaaaaacctgcctcaaagttgagattatagagaaggacaccaagtacagtgtcattgtgatccggagatttgatcccaaactctttcttgttttccttcttggacttatgctatttttttgtggagacttgctgagcagaagtcaaattttctactactctactgggatgactgtgggaattgtggcctctctgctaatcatcatttttatactatctaagtttatgcctaagaaaagtcccatttacgtcatcctggtgggaggctggtctttttctctgtacctcattcaactagtttttaaaaatttacaagagatctggaggtgttactggcagtatcttttaagttatgtcctcacagttggattcatgagttttgcagtatgttacaagtatgggcccttggagaatgaacgaagtatcaacctgctgacctggaccttgcagctgatgggcctgtgtttcatgtattctggcatccagataccacatattgcccttgccattatcatcattgctctttgtactaagaacctggaacaccctattcagtggctgtacatcacctgcagaaaggtgtgtaagggagcagaaaagcctgttccccctcgtctcctgacagaagaagaatatcggatacaaggagaggtagaaacccgaaaggctttagaggagctccgagaattttgtaacagtccagactgctctgcttggaagactgtttctcgaatccagtctccaaaaagatttgctgactttgtggaaggctcttcccacctcacgccaaatgaagtttctgtccatgagcaggagtatggattagggagcattattgcccaggatgaaatctatgaggaagcatcctctgaggaggaggactcatattctcggtgtcctgctatcacacagaacaactttctaacctaggtagtggtcagttatctttacgtggactggcttggtgccttggtccatgttgcatgtgttgtgcaattgctttcaaccctttgaaacagagtgagatagatagggtagaaattctcctactgaaataagaggcctaaaaaggcctccctttggaaatgggaggtctctatgggatccctgaggaaggagagtggataaagtagtgaatgctgggtagttcacttcccattggttaagctaacagcccacttttatgtttccagagaaattggatggccacagctagcatggcattctagctccttcttgaaagttgattcaatcatggcatttctgtcactggctggctctccaaagtaagaactgttgttaagtgcaggaatgcttttagactataggctgcaacttccagagagaaatccacaaatctgagcctccttcactccagcttttatttcagtgactttagaataattattgatttaactgttttgggaggaaaatagatttttattgttttgttttttaaatgaatgtcttttaaaaaacataacaaactcatgttccagaaccagcaagtgctccagagtgacacaccccctaggcccctacatatttattaatatggattatccattaaagccccaggagctgttgttttaagctttgatttagttctcatacatatgatagaaagtcctatttgcctttaggaacatgcctgtaggctcttctgcaggtgagatgtactgggctttttattatattcaactttcaattccatcttaaaaaacatttgtattcttctcttcccattcttccttaccctgcctttgccctttcaggaagggtcagttcccttacctgtgaactatgtatgttcagagtagcattattcctgctagctaggagaagtcatcttgtttaggggatttggatgctttttatacgttctccattttcctgtcattgggtcatgttatctttgagttgctatgaaatcaggaaactgtctccttttcctttcccttcctttgtctacatgctctgtccattcctttcagccttttctcaccacccatactcccccaaatctgggtaatttttaagccttgaaactatgtagtttcttgatacacaatttgtagttatgcagcagccacaatttgcattgccaggaaataggctccaggttatcttcatgcctctgggtgctcattcagctgtcaagtttccatgaacttacacttatttatgattgcgtttctgacctgagatgtatgctgcctgttattgcagtagcattagtttcagattcttttgccattgcaaagtaccccttataaaccagcaatgtcatctgtgaggaagcaaattctcaagtgtctgtcatttacttggttctttttctttgtggtcttcacccttataccctggaaaagtctgtaattaccttagccaggaagatagatggtcatggcaagcgcacagcaccagacttactggctcaccaagatgatggaaaaaggcagatgattttttaaaaagccgtaatgactcctttagaccagccatttagcgtggtaattttgaaaggcctagctccattgcagacttccaaagggtcagctctgagactgccctccaggtgggcagttgattatttccaccagtgttttccagagccttaaactgtcctaagtgacaactacctcagttggcaggaaagagacatatagtagaaagtgaaaaatgagcagtatttgggcagatgctatgggttacagttgaagggtaaaaggaactttacattgggaaacctttatacccttgtgaattatgtacatggtaaaatgttctctctctacaaagaactattaaaacttctgaaatatactattttttaccttatttatagaaattgagacctagcatatttaagcataagtttattttaaaaaataattcaactcgtgcaagtggtctcaggattctctggagattttggtgcctcccctacttagggaggtgatagcttgcctataagggtgacttttcctgatcatgtctttatttcaatgagaaagcactgtgaaattgtgaaagattctcctctttctctgtttaataaacccccatgaaatatagtttccatctctagaccagttttttttccaccgtgtttagacttgaggtgaataaaatcaaactgttttttactccctatctggtagttggagacctgagctgtaggcagtggagatggcaattggttctgcagcctgagagttgctctcacacagtgaaggacggtgctgctctggtgtgctgtgtgtccttgccctgcctgcctgtggctctgcccagatgcttcagatcctctgtgttccggagattgcttgacttcaaccttctttaggagctgctcttgtctccctcttggccacttagtttgctggctcagtcactacttgaagaccccatttaatttttctctggcagttatagctcttgtgatttcagtacagtctcatctctcagaccaatctcatcaagaaggattgaagggataactatgaggtaagctggacattggagccgtgtttgctgccacgtcagcgtcttgctgggtgaatgtcaagccataaatgggctccagggctctggatctcatcagcattggaaatctattgcctctcatcagtctgaccaaattatgtagagcattaatgtagagactcccattaatgggaatacaagaggcagctggcataaaacatttctttcactttcctttcccactcagattgcttcaagagaccaacagaacacagggatcaaaaacaaggaaaatttagcaacttcattaccttctaataagtaattcctgttagccactgcatcccaccaaaactagtttatttttcccctcaaattcatgatttttacgtctgttacaaagggaattttgctgatagctctttgggtcccactgttccattttatgctaatagattccattctagggcccagccgtctcttgactgatggtgttccctttaacccttggcatgtataatagaattttggtgaatgaaagaacccaaataggccagatagtccccccaggccctgatatccataaaaggcttgggaatgcattatgtaattgtccttagtctttttgttgttttagaaaaaaaaaacaagatgggctcagatggatgcctacgtaaaaatggttcctagctgtgtactcataacttttctttgaattgagtagtgaaaggaaggaggaggaaaggaaattaaatgtccttctagtattctctggactcaagtctgacatatgagataataacctatattgaaatgccaagaattgtatctgaaacaagagaacagtttgacacatttatcatgccttcatattacatattaactgaaaccaattaataaacatatgaaatatccattgcacaaggcaaaggcacctaaaccttttgtttctttttctacatagcagaaattgattttttttttatttttttaggggaacctatataattatgacccagtgatgtcttttggtgacttaagcttatgaattcaggttacaattgagttgattctagatggttactaccttgaaaaggatgttggtgccttatgtgacacgagccagagcctgctgggaataaacaaagcagattcatgccaacaccaactcgtagctttagtggcagatgggagtggtcacagactcccaaaatgtggggctttggatttccacaccatcccacgtgtgtgtcatcttcctctttcacactcttgatgataatttgaaaatgatgaaatcacctctgaatttgcctatagcatgagcacattcttatgacaacataacaaatagttcataatgtgaatattagaaactgttacagcctgcagttaccataattttccatgtttgtggaattgatattgaaatagcagggctaaggaattactggcaagttttagcctgtgggtaataccttagggttatttaaatatttgtaattttatttaaatgttcatgaatgtttgaaaggaacaaaattatcagggatggctctttgccatgggtcttattttcaccctcttttctgtaagaaaaaagaacaatgtcttaatgtatttttaaagtttttggtatagtttctaattccaattttaataaaagttttatagat

SEQ ID NO: 486 - protein, 446 aa, Homo sapiens
ATMAGGMKVAVSPAVGPGPWGSGVGGGGTVRLLLILSGCLVYGTAETDVNVVMLQESQVCEKRASQQFCYTNVLIPKWHDIWTRIQIRVNSSRLVRVTQVENEEKLKELEQFSIWNFFSSFLKEKLNDTYVNVGLYSTKTCLKVEIIEKDTKYSVIVIRRFDPKLFLVFLLGLMLFFCGDLLSRSQIFYYSTGMTVGIVASLLIIIFILSKFMPKKSPIYVILVGGWSFSLYLIQLVFKNLQEIWRCYWQYLLSYVLTVGFMSFAVCYKYGPLENERSINLLTWTLQLMGLCFMYSGIQIPHIALAIIIIALCTKNLEHPIQWLYITCRKVCKGAEKPVPPRLLTEEEYRIQGEVETRKALEELREFCNSPDCSAWKTVSRIQSPKRFADFVEGSSHLTPNEVSVHEQEYGLGSIIAQDEIYEEASSEEEDSYSRCPAITQNNFLT

SEQ ID NO: 487 - DNA, 5338 bp, Homo sapiens
ccgaagccggcgaccgccccacctcctccctccctcccgcccgcttcctctgcccacagcgccggccagagcgagctagacaagggcacgcggggcctcgcctagacccgagaagactgcgggcgcgcgcaagcggcggcgtggaagctgtgagcgcccccatcccggaggtctccgccggctcccgggtgaatcagctcccggccgactttaggattcttctggattttaaattttttctttttaaaaaaacttggacggataaaagatgtgccatggcaggatagcaccaaagagcacctcagtgtttgccgtggcctccgtgggacatggagtgttccttccgctagtgatcctttgcaccctgcttggagacggacttgcttccgtgtgccccctaccaccggagccagagaatggtggctacatctgccacccccggccctgcagagaccccctgacagcaggcagtgtcatcgaatacctgtgtgctgaaggctacatgttgaagggcgattacaaatacctgacgtgtaagaatggcgagtggaaaccagccatggagattagctgccgtctcaacgaggataaagacacccacacatcacttggggtccccacgctgtctatagtggcttctactgccagctccgtggcgctcattctcctcctcgtggtgctgtttgtgctgctgcagccaaagctgaagtctttccatcatagcaggcgtgaccagggggtatctggggaccaggtctccatcatggtggatggagtccaggttgcactaccatcatacgaggaggctgtatatggcagttctggtcactgtgtgccacctgctgaccccagagtacagattgtgctgtcagaagggtctgggcccagtgggaggagcgtgccaagggagcaacagctgccggaccaaggggcctgctcctctgcaggtggagaagatgaggccccaggccagtctggactatgtgaagcctggggctctcgggcctcagagactgtgatggtgcatcaggcaaccacctcttcctgggtggccggctcagggaaccgccaactggcacacaaagaaactgcagattcagagaacagtgacatacaaagccttttatccctcacgtcagaggagtacacagatgatattccactgttgaaagaagcatgagggcagcggccagcctttcctctctgcgaggttctctcagcccttcctccctctccctgtgggattgagcaccctgtactctccagccaccttacctggatacctgagctgccacctgtgtatctgtgtatctctgagggccctataggcccaccttgctggaaactcaaggaagattctcgccatctgcctgttggacagctggaggagctggctctttgcctggccccgccttcccatctgtcagagacatatttgaatgtgctggatcaaaccctcccttttcctaagcctctgggtcccctccagccagctctttggcggcagcccccaccagctcctgtgggcctgagtgctgctgtgtttacttgtgcctttcccccaccctgtccagtttccctgtcatgcagacttgttgctgtccacaagccttagtggctgcactgctgccccctgccacacagggggccgggcctgggtctgtcctgtttcctttgagggttgcccctactgccctttgcaggaacagatccaggtgtgagagctcttgagtcaagagtggcagaagtggctctaattggggtgagagtgtagtccctgggcttgccctgggttgaccctggtggcatatttccttggccgaggatggaagatttggagaatcatgtccatgctggcccaggacccagccatctggcccaaaggcacaagctcctggccctgttgagttgagagtttccaagaagcatccagaagatcccaagggagagaaggaaaatggctgataatgattgtcttcctaatatgcaagttctcacttcctacttccagcatcggccttcctggccttgtcttttttttgtttccctggagtataatgggaagttgcatgctgcctcctgggttttatcccagatagctctggctttcttgctgcccacaggggcctggggcaggaaggagacttgctgagatgccatggagtgcccatctggtcactggcagtctgggcaggttgcccctttctgggtttgtggtgacggaggggaggccgagaggcacagaccaagtccccgggtggctgcaggcagctccagcccggtcctgaggatcctcctcaccatggtcacgtgccttagtaactgtgcccaggaagtggcctgctgcttgctgtgctgctgcttttcctacttctgcccttccctgccacccctcgcatgtcacagctgacaagcaattccttgtcttccctggccccctgggggaagggctgagaaacagtccatgtgcaccccaaccttaatggcctgaggtgggcagaggggtgtggagcagcctggagtacagggccctgggggaggagcccactgatgaggggcgctctcccatagccatgtgttgaatgctaactaggctggggtggacgaactctgccaactgctgtcatcttagaagatagatgcagcagtaaggaatgtttgttttgcttttttctgaaattttctgaagcactgtggctgggaaacttcgaagcggaccctgtgctgcatgtctgctcctcccctgagcctgtctgcttgggggtggtaaaaataaaaatcccagtttattttcagtaccttacctaacagggttggctccaggcgtgggtggcctagaagatgaggggagtggtcttctcccagccttttaccctcttgcctcctgcctccgcgcttacacacgcactttaccacccggtcattccctggcctcttgctgccacttgtagtcttccttccttcctctcagggtaagggcagtgcctgctgtgcctgttggccactcccacacttcccctcccccaggagccctcatctgctgtgctgagtccaggaaagcatagttaggtagggagctggttggagaaggtgctagaactagaaggcagatgagactagcatgggcccacctggagggctgtccctaatggccccagtcgccttacctcacccacagcagtgcccttgtcttcctccaaaacagaaagcagtgacaaaagggggaggggtggtaatctgaagtctcactgctgagccttcagcttttatttttcactgtttcaaaacccgcattctattctagaatggtttttaaaatggaagatcttacctttttctatcttgttactctggggttttgtccccctaagagattgcactttttgtttggggtttattcagctgcatagatgaccagcttgatccctggtgaaatgaaaagccttccttctcctgaagcctctttccgccctgccctccactaacaacactgaggagcacaagcccaggcttgcccacctggtaggaaaggaagaaattagaacaatgggagccttggctcccctctcgtctcctcccctccttcttgtcactggctttgatgaggcccacttcccagaggctcctgggcctgtgagtgcaggagctcattctcccctcactgctgaagtctgtgacagcttcttcctccagttatgtctttcttccaaagcaatttcttaaccatcagccatgtgctgctatttctagggcttctgggctttgtcccttactgagagattagggactccacagctgccttgaggtagggcctggctgagagacaagggtagcagcaggtggcaggctgttaaaagacaggctgcctgaggagcctggagcaggtggaaacaggtggaagaaaccggccacagccctgctttaccgggctcacctctagggcattccagcaagaggctgatgcaggagaatggccagcaccaaaggacatttaaaagagtttttgggtttttttgtttgtttgttgttggtgtttgtttttttttttttttttttggcacacttgagctgactcagtgcaggtttaatatcctggtgacttgcagtcacattctaatgactttcaagggccagaatatggtgaaaatcacttaaaatatccgtcccttccatgccttagtttagcaggtaggctctatcttttgccatttctgtattttatgtgctgtgttcccgtttcactgggtatgaactgtgaaatggactgaatcctggccactttatgagtttgtttggttttataaggcatttcaatgtacattctataaatacaagcactccatttgcaaacagatcttaagctaatattttctttcccattcatcttgccctccccctcctcccaccagctttaaagttcagtggagaagccagatggcaattcagacaaaggtatactcttcctgcttcatgggtggtggcacgggaatagatagcccttagccctttccctcccagtcccagctgagccctcagaccacttgcttcccacataacaatgtcgcctccatttccgaggaacatccttgcgtagagaatgaaatatgctgcaatcatttctgcatccttactcctcacccccaaagaaaaaaaaaaggcctagcagggaagcagcatgcaggcttcacagcttaatgccaaggacagcgagtgaggctgggagcttctcttgggcctgctgggtctgtcagctctcggaatagggacagtccttactggtgccccaaggtgggacttggagaatattttgcttggcatatgtttggtctgaatggtgtagttgctggttccctagagaggaaaaggtggcaggcccagctttgctgggaaatggctcttaatttccagttgaaaccctagtagaattgtgaatgaaaacctcaaggttgagcccctctgccaagcagcagagctagtagaaggggatgcaggggcaaagcactcagttgccaagcaaggaggagagatgtacgtgggctgtgtggcagtccccacaccctgccctggcttcttcaggttatcgcaccactatggaatcctttgcagaatggtactcatataatggtttaaaacaacacattcataattgactctgtgcaggatgtcactcaatcagtttgggtttgctttattttattttatatatatattttttggtatcctgtacattgcagtgggtgtgaagatagtattttaatatttgtacaaagtttaatttaattttaattgttctatgtatataactgcatttctaaataattaaaaaaaagttcttatg

SEQ ID NO: 488 - protein, 303 aa, Homo sapiens
MCHGRIAPKSTSVFAVASVGHGVFLPLVILCTLLGDGLASVCPLPPEPENGGYICHPRPCRDPLTAGSVIEYLCAEGYMLKGDYKYLTCKNGEWKPAMEISCRLNEDKDTHTSLGVPTLSIVASTASSVALILLLVVLFVLLQPKLKSFHHSRRDQGVSGDQVSIMVDGVQVALPSYEEAVYGSSGHCVPPADPRVQIVLSEGSGPSGRSVPREQQLPDQGACSSAGGEDEAPGQSGLCEAWGSRASETVMVHQATTSSWVAGSGNRQLAHKETADSENSDIQSLLSLTSEEYTDDIPLLKEA

SEQ ID NO: 489 - DNA, 5371 bp, Homo sapiens
gggggcgggcccaggtagcaggtttggctgcgcgggggccgcgcgtcggagtttccccctttctagggtgaggatggttctacacagccacccggagttccttagttgaaaggtgcgccctgctgtgacagaatgtggtaattgtaatctttaacattttcatgtaaaacatatttcctgatcatctttccattgtcttcatggaaaattgataaatatttgtgccttccaactctcgtcttggttgaatgacttcatcttaatacaacatggacaccacgttgctgaaaacatgctttgggactgccactgaatttatcttttgcggttttatgacaaagttattagtagtttcccttttttgaattagtattttgaagttaatatcacaatgagttcaggcttatggagccaagaaaaagtcacttcaccctactgggaagagcggattttttacttgcttcttcaagaatgcagcgttacagacaaacaaacacaaaagctccttaaagtaccgaagggaagtataggacagtatattcaagatcgttctgtggggcattcaaggattccttctgcaaaaggcaagaaaaatcagattggattaaaaattctagagcaacctcatgcagttctctttgttgatgaaaaggatgttgtagagataaatgaaaagttcacagagttacttttggcaattaccaattgtgaggagaggttcagcctgtttaaaaacagaaacagactaagtaaaggcctccaaatagacgtgggctgtcctgtgaaagtacagctgagatctggggaagaaaaatttcctggagttgtacgcttcagaggacccctgttagcagagaggacagtctccggaatattctttggagttgaattgctggaagaaggtcgtggtcaaggtttcactgacggggtgtaccaagggaaacagctttttcagtgtgatgaagattgtggcgtgtttgttgcattggacaagctagaactcatagaagatgatgacactgcattggaaagtgattacgcaggtcctggggacacaatgcaggtcgaacttcctcctttggaaataaactccagagtttctttgaaggttggagaaacaatagaatctggaacagttatattctgtgatgttttgccaggaaaagaaagcttaggatattttgttggtgtggacatggataaccctattggcaactgggatggaagatttgatggagtgcagctttgtagttttgcgtgtgttgaaagtacaattctattgcacatcaatgatatcatcccagctttatcagagagtgtgacgcaggaaaggaggcctcccaaacttgcctttatgtcaagaggtgttggggacaaaggttcatccagtcataataaaccaaaggctacaggatctacctcagaccctggaaatagaaacagatctgaattattttataccttaaatgggtcttctgttgactcacaaccacaatccaaatcaaaaaatacatggtacattgatgaagttgcagaagaccctgcaaaatctcttacagagatatctacagactttgaccgttcttcaccaccactccagcctcctcctgtgaactcactgaccaccgagaacagattccactctttaccattcagtctcaccaagatgcccaataccaatggaagtattggccacagtccactttctctgtcagcccagtctgtaatggaagagctaaacactgcacccgtccaagagagtccacccttggccatgcctcctgggaactcacatggtctagaagtgggctcattggctgaagttaaggagaaccctcctttctatggggtaatccgttggatcggtcagccaccaggactgaatgaagtgctcgctggactggaactggaagatgagtgtgcaggctgtacggatggaaccttcagaggcactcggtatttcacctgtgccctgaagaaggcgctgtttgtgaaactgaagagctgcaggcctgactctaggtttgcatcattgcagccggtttccaatcagattgagcgctgtaactctttagcatttggaggctacttaagtgaagtagtagaagaaaatactccaccaaaaatggaaaaagaaggcttggagataatgattgggaagaagaaaggcatccagggtcattacaattcttgttacttagactcaaccttattctgcttatttgcttttagttctgttctggacactgtgttacttagacccaaagaaaagaacgatgtagaatattatagtgaaacccaagagctactgaggacagaaattgttaatcctctgagaatatatggatatgtgtgtgccacaaaaattatgaaactgaggaaaatacttgaaaaggtggaggctgcatcaggatttacctctgaagaaaaagatcctgaggaattcttgaatattctgtttcatcatattttaagggtagaacctttgctaaaaataagatcagcaggtcaaaaggtacaagattgttacttctatcaaatttttatggaaaaaaatgagaaagttggcgttcccacaattcagcagttgttagaatggtcttttatcaacagtaacctgaaatttgcagaggcaccatcatgtctgattattcagatgcctcgatttggaaaagactttaaactatttaaaaaaatttttccttctctggaattaaatataacagatttacttgaagacactcccagacagtgccggatatgtggagggcttgcaatgtatgagtgtagagaatgctacgacgatccggacatctcagctggaaaaatcaagcagttttgtaaaacctgcaacactcaagtccaccttcatccgaagaggctgaatcataaatataacccagtgtcacttcccaaagacttacccgactgggactggagacacggctgcatcccttgccagaatatggagttatttgctgttctctgcatagaaacaagccactatgttgcttttgtgaagtatgggaaggacgattctgcctggctcttctttgacagcatggccgatcgggatggtggtcagaatggcttcaacattcctcaagtcaccccatgcccagaagtaggagagtacttgaagatgtctctggaagacctgcattccttggactccaggagaatccaaggctgtgcacgaagactgctttgtgatgcatatatgtgcatgtaccagagtccaacaatgagtttgtacaaataactggggtcatcgggaaaggcaaagaaactgaaggcagagtcctaacgttgcatcttattcgagctggcagttctgttcacgtccattgccggcaatggatgtctttgtggtgatgatccttcagaaaaggatgcctctgtttaaaaacaaattgcttttgtgtccctgaagtatttaataagaagcattttgcactctagaaagtatgtttgtgttggttttttaagaagtctaaatgaagttattaatacctgaagctttaagttaagtgcattgatcatatgatatttttggaagcatacaattttaattgtggaagtttaaagcctcttttagtccattgagaatgtaaataaatgtgtcttctttatggaccaaggatatgaaatcatttttcttttgtagctaacggttgccttgaggaagaaataatttggttttattaagagtctactctcaatccagttattagagatgtactgagtttgatttgttaatcctttctatatactgctgatcttgcatgtctacaatctgctcagtttttctgtgtttctgcaatagtggtcagaaaaatacttaaattcccttaatggtgttgttttctatttgttctggttttgagataaatgagtgattctgtccccaaatgtccatttttgaagtgattttcctggaggattagggtatttagcagttgaagctcttcattcatagtagttactgtcagctaacaggttttttaaggcttttaactattaatattttatggaatggggcaaagtaaattgatgaaagaattggagtgataatagtcctttacaaacatacagtccataagaaaatgaatttggcatatagaattattacaatttcctgggagagatggatatttaaacctctattattttagacaagactgtctagaacttaagtttgatctgtcagccagtactcccattaaattcagtgtagtttcacttgatagaatcagatatgttatcgaaatgttagcagcagcttcatcctccttctgattaaagtaagtagaaatgggatgttttgtttaataacagccatagtgtgtgtttagaccacagcggatgttgtagaccaggaccatagatgatacatgtcagtgctgtggaatgtgcattctctgagtgttgttttgtggtatcattgtctttcctgaatgactttctaactgtgcagaaaggcagaaaagtcatcatatgtatatgtcatatgactttataaaatatttaatgtgacaaaaagtggaaagaatctttacaaaccctgcaattacttttttaaaggcacttttactctttggttttatcattccattttgctaatatttactagctttataaattacagtaaggtacaaaaactcatcttgtaatattttcatttttgaagtgaaaaagtacatatattttgcacaaggttttatactgctaagtgcttggttggggtggtgagatgatgattagatcaggggtgaggctgagagactctgggtttagggctagccctgcctccatctcccttgggtaaaatgaagggtgtggggtaaaagatgcataaggccttttctagctctgacagcctagaagtccaatcaccctgtaataaatatgtgttgaatgaagaaatgggtgaatgagcttgtcaatgtgattttaaaaaattgactacctggaggaatgattaggaatctaaatgaagccagccctcggtatctgcaggtttctcatccatggattcaaccaactgcaaatggaaaatacgattttttttaaaaaaaggatggttacatccgtattgaacatgtacagacttttttcttgtcattattctctgaacaatacaagaactctttatgtagcatttacatttattaggtattataagtaatctagagattatttaattaaaatatacaggaggatgtgtgtttatatgccagaaattctgtaccattttgtatcagggaattgagcatcttcagatgttggtatctgcagggatcctggaaccaaacccctgcagatactaagggctgacgatctaggtaagactggatttaacagttggaaa

SEQ ID NO: 490 - protein, 956 aa, Homo sapiens
MSSGLWSQEKVTSPYWEERIFYLLLQECSVTDKQTQKLLKVPKGSIGQYIQDRSVGHSRIPSAKGKKNQIGLKILEQPHAVLFVDEKDVVEINEKFTELLLAITNCEERFSLFKNRNRLSKGLQIDVGCPVKVQLRSGEEKFPGVVRFRGPLLAERTVSGIFFGVELLEEGRGQGFTDGVYQGKQLFQCDEDCGVFVALDKLELIEDDDTALESDYAGPGDTMQVELPPLEINSRVSLKVGETIESGTVIFCDVLPGKESLGYFVGVDMDNPIGNWDGRFDGVQLCSFACVESTILLHINDIIPALSESVTQERRPPKLAFMSRGVGDKGSSSHNKPKATGSTSDPGNRNRSELFYTLNGSSVDSQPQSKSKNTWYIDEVAEDPAKSLTEISTDFDRSSPPLQPPPVNSLTTENRFHSLPFSLTKMPNTNGSIGHSPLSLSAQSVMEELNTAPVQESPPLAMPPGNSHGLEVGSLAEVKENPPFYGVIRWIGQPPGLNEVLAGLELEDECAGCTDGTFRGTRYFTCALKKALFVKLKSCRPDSRFASLQPVSNQIERCNSLAFGGYLSEVVEENTPPKMEKEGLEIMIGKKKGIQGHYNSCYLDSTLFCLFAFSSVLDTVLLRPKEKNDVEYYSETQELLRTEIVNPLRIYGYVCATKIMKLRKILEKVEAASGFTSEEKDPEEFLNILFHHILRVEPLLKIRSAGQKVQDCYFYQIFMEKNEKVGVPTIQQLLEWSFINSNLKFAEAPSCLIIQMPRFGKDFKLFKKIFPSLELNITDLLEDTPRQCRICGGLAMYECRECYDDPDISAGKIKQFCKTCNTQVHLHPKRLNHKYNPVSLPKDLPDWDWRHGCIPCQNMELFAVLCIETSHYVAFVKYGKDDSAWLFFDSMADRDGGQNGFNIPQVTPCPEVGEYLKMSLEDLHSLDSRRIQGCARRLLCDAYMCMYQSPTMSLYK

SEQ ID NO: 491 - DNA, 1911 bp, Homo sapiens
ccctgcgcggctgctggaccgacgggcgcacccaggtaggggggcggctgagccgcgcagtgcggaccctcgcggggaactgcgccgccgccaccatgtctcaggaaggtgtggagctggagaagagcgtccggcgcctccgggagaagtttcatgggaaggtatcctccaagaaggcgggggctctgatgaggaaattcggcagcgaccacacgggagtggggcgctccatcgtgtacggggtaaagcaaaaagatggccaagaactaagtaacgatctggatgcccaggatccaccagaagatatgaagcaggaccgggacattcaggcagtggcgacctccctcctgccactgacagaagccaacctacgcatgtttcaacgtgcccaggacgaccttatccctgctgtggaccggcagtttgcctgctcctcctgcgaccacgtctggtggcgccgcgtgccccagcggaaggaggtatcccggtgccggaaatgccggaagcgctacgagccagtgccagctgacaagatgtggggcctggctgagttccactgcccgaagtgtcggcacaacttccggggctgggcacagatggggtccccgtccccctgctacgggtgcggcttccccgtgtatccaacacggatcctccccccgcgccgggaccgggacccggatcgccgcagcacccacactcactcctgctcagctgccgactgctacaaccggcgagagccccacgtgcctgggacatcctgtgctcaccccaagagccggaagcagaaccacctgcccaaagtgctccaccccagcaaccctcacattagcagtggccccactgtggccacctgcttgagccagggtggcctcctggaagacctggacaacctcatcctggaggacctgaaggaggaggaggaggaagaggaggaggtggaggacgaggagggcgggcccagggagtgacccctgccaggtgcagatacaaaccagacacggtctgtggctactttgtgttattataagatatgagctcaaaccgagatatgaatgaccttggggagccatctgaggccaagatattgacgggggggattcctgggtcccattttcagcgcccagggtcacagatccacagtgggaagttctgtgggacacattggcactgagccacaaagaaggtgtggccagaacaacttgggctcctgctgaccaatgtcctctagggcctaggggacagaggaacacagagtcacagcttcaggggccgaatgagcatggcggccttcctgagagaatatgccccaccacgaaactcagcccagtagacaccatcctggtagcggcttcggtagtggccgccgtggtgccacacaccgttgaggttggagtgggcacaggcatggtaccaccagcctccccgctggtacagggcacagttacctgaggggagagagagagtccatgtcctctcaccagaataaaagcctctacctgcacctcacagtgcaaggcttttgccaggcatcccctggcccctcccattcttattgaatacaagccctgatcttccatctcctcagcaaaaaaataggagccctggccccccaactttcttcagagtaatagccttaattccttccctatctccttaccaaagtacaagtcacatctttcccaccttttctgcaaactaggagtctaccgttcattcctttatcaaagaaaagtatctacttcctttctagaataagagtactagctctcaccctctgccctttacttgaacaggagtcttgattctttttttgcctcatcagagaaggaatctggactccccatccccccaccaggataaaagtcctgacctttgttctcttgacggaataaaagcttgcttatcctt

SEQ ID NO: 492 - protein, 291 aa, Homo sapiens
MSQEGVELEKSVRRLREKFHGKVSSKKAGALMRKFGSDHTGVGRSIVYGVKQKDGQELSNDLDAQDPPEDMKQDRDIQAVATSLLPLTEANLRMFQRAQDDLIPAVDRQFACSSCDHVWWRRVPQRKEVSRCRKCRKRYEPVPADKMWGLAEFHCPKCRHNFRGWAQMGSPSPCYGCGFPVYPTRILPPRRDRDPDRRSTHTHSCSAADCYNRREPHVPGTSCAHPKSRKQNHLPKVLHPSNPHISSGPTVATCLSQGGLLEDLDNLILEDLKEEEEEEEEVEDEEGGPRE

SEQ ID NO: 493 - DNA, 3401 bp, Homo sapiens
aaaatttgaagacaagatgggcacctactctacaattctgataaaaacagaggtcatcgaatgtgggaactactgtggagtacgcatcattcactctttgattgcagagttctcactggaagaattgaagaaaagctatcacctgaataaaagtcaaattatgttggatatgctaactgagaatttgttcttcgatactggtatgggaaaaagtaaatttttgcaagatatgcacacactcctactcacaagacaccgcgatgaacatgaaggtgaaacaggaaattggttttccccatttattgaagcattacataaagatgaaggaaatgaagcagttgaagctgtattgcttgaaagtatccatcggttcaacccaaatgcattcatttgccaagcgttggcaagacatttctacattaaaaagaaggactttggcaatgctctaaactgggcaaaacaagcaaaaatcatagaacctgacaattcttatatctcagatacactgggtcaagtctacaaaagtaaaataagatggtggatagaggaaaacggaggaaacgggaacatttcagttgatgatctaattgctcttttggatttagcagaacatgcctcaagtgcattcaaagaatctcaacagcaaagtgaagatagagagtatgaagtgaaggaaagattgtatccgaagtcaaaaaggcggtatgatacttacaatatagctggttatcaaggagagatagaagttgggctttacacaatccaaattctccagctcattcctttttttgataataaaaatgagctatctaaaagatatatggtcaattttgtatcaggaagtagtgatattccaggggatccaaacaatgaatataaattagccctcaaaaactatattccttatttaactaaattgaaattttctttgaaaaagtcctttgatttttttgatgaatactttgtcctgctaaaacccaggaacaatattaagcaaaatgaagaggccaaaactcggagaaaggtggctggatattttaagaaatatgtagatatattttgtctcttagaagaatcacaaaacaacacaggtcttggatcaaagttcagtgagccacttcaagtagagagatgcaggagaaacctagtagctttaaaagcagacaagttttctgggctcttggaatatcttatcaaaagtcaagaggatgctataagcactatgaaatgtatagtgaacgaatatacttttctcttagaacaatgcactgtcaaaatccagtcaaaagaaaagctaaatttcatcttggccaacattattctctcctgtatccaacctacctccagattagtaaagccagttgaaaaactaaaagatcagcttcgagaagtcttgcaaccaataggactgacttatcagttttcagaaccgtattttctagcttccctcttattctggccagaaaatcaacaactagatcaacattctgaacaaatgaaagagtatgctcaagcactaaaaaattctttcaaggggcaatataaacatatgcatcgtacaaagcaaccaattgcatatttctttcttggaaaaggtaaaagactggaaagacttgttcacaaaggaaaaattgaccagtgctttaagaagacaccagatattaattccttgtggcagagtggagatgtgtggaaggaggaaaaagtccaagaacttttgcttcgtttacaaggtcgagctgaaaacaattgtttatatatagaatatggaatcaatgaaaaaatcacaatacccatcactcccgcttttttaggtcaacttagaagtggcagaagcatagagaaggtgtctttttacctgggatttcccattggaggcccacttgcttatgacattgaaattgtttaagagcctgatattcttcctccaagaatttgatctcagtacccatttaatttttttggactcaagatctatgctttaaaccggcaaggttatagatacagcctctagctcttcagatctgtacatgcagtatttaatttcctcttaaacatgttatgagttctacaaggacaatagtgaaaaaggaaggagtgagatatatgaaaagtagcaaatatgttccttggtttggttaacatcattgatgacaaaataataaggagctatgactggagtcaggagaagttagtgtaataagctggctacacagaaccccactacttaccaggcatggattgaagaagattgtctactcaaatggcatttagacattagaatgtctgggaaaatatttctcaaagacagcaaaaacctctcaaactgaggagcaacatttattcttactaagcagatcatcaatgtatcatgtgcttggcactcaaggatcttccaaaacagaggaccaaccagtcttctgaaggtcatgcccacagaagtcatcggaccttaccaaagtaggttggagaattagattgccttttcatgcagtgagattcagttaagcaaaaatgaaatttgtctctatagctaattagcttatcaactcccctccaaacaaacaattaaaaaaaaaacatacagacactcaaattccacaagctaatgaacaaaagggactcttgtgagaagactaatgagtccctcatccagaagatgccaatgtactggcagattaacatacaacctatgttttgaacaaaaacaaccagcgatacgtaatcaaaatgtaattttcccctaataaaattatggatatgggcagtcatcaatggctgccaaaaccattaagtggaaagctgattaaaaaacaaaaatttctaatggatttatcaaactgtcccaaatcctgataaatattaacatcacagaggaagaccagacattatgggcctggaagtactataggagtgcacacatcacccgtgacatggtcttgccaaataattaaacctgaatttgatcaggtctctggatcttatttgcaattcaaaagaaattttaaaaaaatcctactaacaccaccacaaatatgcaatcagcaatatccagaaaggggaaattcacaggacaaaaacctggttttcttttttggtttcttcaaccaaaaaagaaagaaattgcaaaggaccaaaaaaatgttggggaatctatacattataagggacttaacaactaaagggcaacatatagactttagatcctaatttgagcaaaatctaaaatcaattattaggcaatcagaaaaatttgaacacagactagatatttgaggatattaaggtactatattattgaagattccatggttatgttttttaaagagttcatgccttttagagatacatactaaagtatttgtaaataaatgacatgatctagaaaaaaaaaaaaaaaa

SEQ ID NO: 494 - protein, 630 aa, Homo sapiens
MGTYSTILIKTEVIECGNYCGVRIIHSLIAEFSLEELKKSYHLNKSQIMLDMLTENLFFDTGMGKSKFLQDMHTLLLTRHRDEHEGETGNWFSPFIEALHKDEGNEAVEAVLLESIHRFNPNAFICQALARHFYIKKKDFGNALNWAKQAKIIEPDNSYISDTLGQVYKSKIRWWIEENGGNGNISVDDLIALLDLAEHASSAFKESQQQSEDREYEVKERLYPKSKRRYDTYNIAGYQGEIEVGLYTIQILQLIPFFDNKNELSKRYMVNFVSGSSDIPGDPNNEYKLALKNYIPYLTKLKFSLKKSFDFFDEYFVLLKPRNNIKQNEEAKTRRKVAGYFKKYVDIFCLLEESQNNTGLGSKFSEPLQVERCRRNLVALKADKFSGLLEYLIKSQEDAISTMKCIVNEYTFLLEQCTVKIQSKEKLNFILANIILSCIQPTSRLVKPVEKLKDQLREVLQPIGLTYQFSEPYFLASLLFWPENQQLDQHSEQMKEYAQALKNSFKGQYKHMHRTKQPIAYFFLGKGKRLERLVHKGKIDQCFKKTPDINSLWQSGDVWKEEKVQELLLRLQGRAENNCLYIEYGINEKITIPITPAFLGQLRSGRSIEKVSFYLGFPIGGPLAYDIEIV

SEQ ID NO: 495 - DNA, 1804 bp, Homo sapiens
agtacttcctgttctcggctaaccctggcgctgggccgggggctggagagtgaccgtggtctgagtgacctgggacggctgcgtgggccggggtgggcctcaaagccgggcaccagacgggaggggcggcgctcgggccgcgcgctgcccgcgccgggtcctggcgggcggcgaggctggggctgactcctgcctcaggatgccgggggaggaagaggagcgggccttcctggtggcccgcgaggagctggcgagcgccctgaggagggattccgggcaggcgttttccctggagcagctccggccgctactagccagctctctgccgctagccgcccgctacctgcagctggacgccgcacgccttgtccgctgcaacgctcatggggagccccgaaactacctcaacaccctgcccaccccttcctgggatgggccagacaagcagagcctggtcaggcggcttttggcagtctacgcactccccagctggggccgggcagagctggcactgtcactgctgcaggagacacccaggaactatgagttgggggatgtggtagaagctgtgaggcacagccaggaccgggccttcctgcgccgcttgcttgcccaggagtgtgccgtgtgtggctgggccctgccccacaaccggatgcaggccctgacttcctgtgagtgcaccatctgtcctgactgcttccgccagcacttcaccatcgccttgaaggagaagcacatcacagacatggtgtgccctgcctgtggccgccccgacctcaccgatgacacacagttgctcagctacttctctacccttgacatccagcttcgcgagagcctagagccagatgcctatgcgttgttccataagaagctgaccgagggtgtgctgatgcgggaccccaagttcttgtggtgtgtccagtgctcctttggcttcatatatgagcgtgagcagctggaggcaacttgtccccagtgtcaccagaccttctgtgtgcgctgcaagcgccagtgggaggacttccagaactggaaacgcatgaacgacccagaataccaggcccagggcctagcaatgtatcttcaggaaaacggcattgactgccccaaatgcaagttctcgtacgccctggcccgaggaggctgcatgcactttcactgtacccagtgccgccaccagttctgcagcggctgctacaatgccttttacgccaagaataaatgtccagagcctaactgcagggtgaaaaagtccctgcacggccaccaccctcgagactgcctcttctacctgcgggactggactgctctccggcttcagaagctgctacaggacaataacgtcatgtttaatacagagcctccagctggggcccgggcagtccctggaggcggctgccgagtgatagagcagaaggaggttcccaatgggctcagggacgaagcttgtggcaaggaaactccagctggctatgccggcctgtgccaggcacactacaaagagtatcttgtgagcctcatcaatgcccactcgctggacccagccaccttgtatgaggtggaagagctggagacggccactgagcgctacctgcacgtacgcccccagcctttggctggagaggatccccctgcttaccaggcccgcttgttacagaagctgacagaagagatacccttgggacagagtatcccccgcaggcggaagtagctgagggcgagggtcccgatgagggtcccatggcctgctccctcaggaacagctccagcaccaataaagaggcatcttaccacccag

SEQ ID NO: 496 - protein, 505 aa, Homo sapiens
MPGEEEERAFLVAREELASALRRDSGQAFSLEQLRPLLASSLPLAARYLQLDAARLVRCNAHGEPRNYLNTLPTPSWDGPDKQSLVRRLLAVYALPSWGRAELALSLLQETPRNYELGDVVEAVRHSQDRAFLRRLLAQECAVCGWALPHNRMQALTSCECTICPDCFRQHFTIALKEKHITDMVCPACGRPDLTDDTQLLSYFSTLDIQLRESLEPDAYALFHKKLTEGVLMRDPKFLWCVQCSFGFIYEREQLEATCPQCHQTFCVRCKRQWEDFQNWKRMNDPEYQAQGLAMYLQENGIDCPKCKFSYALARGGCMHFHCTQCRHQFCSGCYNAFYAKNKCPEPNCRVKKSLHGHHPRDCLFYLRDWTALRLQKLLQDNNVMFNTEPPAGARAVPGGGCRVIEQKEVPNGLRDEACGKETPAGYAGLCQAHYKEYLVSLINAHSLDPATLYEVEELETATERYLHVRPQPLAGEDPPAYQARLLQKLTEEIPLGQSIPRRRK

SEQ ID NO: 497 - DNA, 760 bp, Homo sapiens
gagttttcatttgtggtgagattctctcccaggccacaagacatttcctgctcggaaccttgtttactaatttccactgcttttaaggccctgcactgaaaatgcaagctcaggcgccggtggtcgttgtgacccaacctggagtcggtcccggtccggccccccagaactccaactggcagacaggcatgtgtgactgtttcagcgactgcggagtctgtctctgtggcacattttgtttcccgtgccttgggtgtcaagttgcagctgatatgaatgaatgctgtctgtgtggaacaagcgtcgcaatgaggactctctacaggacccgatatggcatccctggatctatttgtgatgactatatggcaactctttgctgtcctcattgtactctttgccaaatcaagagagatatcaacagaaggagagccatgcgtactttctaaaaactgatggtgaaaagctcttaccgaagcaacaaaattcagcagacacctcttcagcttgagttcttcaccatcttttgcaactgaaatatgatggatatgcttaagtacaactgatggcatgaaaaaaatcaaatttttgatttattataaatgaatgttgtccctgaacttagctaaatggtgcaacttagtttctccttgctttcatattatcgaatttcctggcttataaactttttaaattacatttgaaatataaaccaaatgaaatattttaactgataaaaaaaaaaaaaaaaaataaaaaa

SEQ ID NO: 498 - protein, 115 aa, Homo sapiens
MQAQAPVVVVTQPGVGPGPAPQNSNWQTGMCDCFSDCGVCLCGTFCFPCLGCQVAADMNECCLCGTSVAMRTLYRTRYGIPGSICDDYMATLCCPHCTLCQIKRDINRRRAMRTF

SEQ ID NO: 499 - DNA, 3309 bp, Homo sapiens
gcggcgcgcccgagcctagtccccacgccgcggcgcgcccgggctccctgctgatcccagaacaatcaaccatgacgaccgaatctggatcagactcggaatccaagccggaccaggaggccgagccccaggaggcggcgggggcgcaggggcggcgggggccgtgccggagccgcccaaggaggagcagcagcaggccctggagcagttcgccgccgctgcagcgcacagcaccccggtgcgagggaggtcactgacaaggaacaggagtttgctgccagggctgcaaaacagctcgaatatcagcaattagaagacgataaactttctcagaaatcatctagcagtaaactctctcggtctccattaaagattgtcaaaaagcctaaaagcatgcagtgcaaagtgatacttctcgatggatcagaatatacctgtgatgtagagaaacgctccagaggacaagtgctgtttgataaagtgtgtgaacacttgaacttgctagagaaagactactttgggcttacgtatcgagatgctgaaaaccagaagaattggttggaccctgctaaggaaataaaaaaacaggttcgaagtggtgcttggcacttttcatttaatgtgaaattttatccaccagaccctgcccaactatctgaagatatcaccaggtactacctctgcttgcagttgcgagatgacatcgtgtccggaaggctgccctgctcctttgttaccctggccttgctgggctcctacactgtccagtcagagctcggagactatgacccagatgaatgtgggagcgattacattagtgagttccgctttgcaccaaaccacactaaagaactggaagacaaagtgatcgagctgcacaagagccacagaggaatgacgccagcagaagcagagatgcatttcttggaaaatgccaaaaaattatcaatgtatggggtagatttacatcatgctaaggactcagaaggggtagaaattatgttaggagtttgtgcaagtggtctgttgatatatcgcgaccggctgcgaataaacagatttgcctggcccaaggttctaaagatttcatacaaacggaacaacttttacattaagatccggccgggagagtttgaacaatttgaaagcaccattgggtttaagctgccaaaccatcgagctgccaagcgtttatggaaagtatgtgttgagcatcatacatttttcagactactgttaccagaagcacctcccaagaaattcctaaccttgggttccaagtttcgttatagtggcaggacacaagcgcaaacgagaagagccagtgcgttgatagatcgcccagcaccttactttgaacgctcatccagcaaacgttataccatgtctcgcagcttggatggagcatcagtgaatgaaaaccatgaaatatacatgaaggattctatgtctgctgcagaggttggtactggccagtacgccacaacaaaaggcatctctcagaccaacttgatcaccactgtgactccggagaagaaggctgaggaggagcgggacgaggaagaggacaaacggaggaagggggaagaagtcacgcccatctcggccatccagcacgagggaaagactgacagtgagcgcacggacaccgcagccgacggggagaccactgccactgaggagctagaaaaaactcaagatgacctgatgaaacatcaaaccaacattagcgagctgaaaagaaccttcttagaaacctcaacagacactgccgtaacgaatgaatgggagaagaggctttccacctcccccgtgcgactggccgccaggcaggaggatgcccccatgatcgaaccacttgtccctgaagagaaaatggaaaccaagacggagtccagtggatagagacggaacccaccgtgcaccacctgccgcttagcactgagaaggtggtgcaggagaccgtgttggtggaggagcggcgtgtggtgcacgcgagtggggatgcttcttactcggcgggagacagcggggatgctgcagcacagcccgcattcacaggcattaaagggaaagagggctctgcttgacggagggggctaaagaggaaggaggggaggaggtcgctaaagctgtcctggaacaggaagagacagccgctgcttcccgtgagcgacaagaggagcagagtgcagccatccacatttcagaaactttggaacaaaaacctcattttgagtcctcaacggtgaagacggaaaccatcagttttggcagtgtttcaccgggaggagtaaagctagaaatttccacaagaagtgccagtagttcacaccgaaaccaaaaccatcacatatgaatcatcacaggtcgatccaggcacagatctggagccaggcgtgctgatgagtgcacagacgatcacatctgaaaccaccagtaccaccaccactacccacatcaccaaaactgtgaaagggggcatttcagagacaagaattgagaagcgaatagtcatcacgggggatgcagacattgaccatgaccaggcgctggctcaggcaattaaagaggccaaagagcagcaccctgacatgtcagtgaccaaagtagtggtccataaagagacagagatcacaccagaagatggagaggattgaccagaggaataacttagcttgcacatgaatgcagtcatgcaaaccgttaggaaaaccagagcctatatggagttccctcttctaacccaactgtacttgtatctgtccgtggaaaatttcagtccagaagaattgaccttgaccattaataaagacactggcagagagatcttcccataataaagcaatctgattcagcatcactaaaccgataatgcatgaagcaacgataaaattacaaaagagcagcatttttaattttcacaaaatgtctcagttttcagctatacctgctcgttcataaccaacaatataaaccgtggtctcatgtaacacataaacaattcatgcctttcatagtttattattattaaagtctaaacaaaattgcaatttcttaggtaaccttatatttacaataaatgaagattaccctcaaatgctagaagctgtctaggtccgtccggtgtgtcagatttcctcagattagatgtgccaataaccaagtttattcagtaaacaacttgtacttgtttcatctggtttattactctcacccataaacagtaatgactctctgaccctctggaaatatgtaatgcttccaatcttgctttgtgtatctcatttaatttgttccggttaagga

SEQ ID NO: 500 - protein, 503 aa, Homo sapiens
MQCKVILLDGSEYTCDVEKRSRGQVLFDKVCEHLNLLEKDYFGLTYRDAENQKNWLDPAKEIKKQVRSGAWHFSFNVKFYPPDPAQLSEDITRYYLCLQLRDDIVSGRLPCSFVTLALLGSYTVQSELGDYDPDECGSDYISEFRFAPNHTKELEDKVIELHKSHRGMTPAEAEMHFLENAKKLSMYGVDLHHAKDSEGVEIMLGVCASGLLIYRDRLRINRFAWPKVLKISYKRNNFYIKIRPGEFEQFESTIGFKLPNHRAAKRLWKVCVEHHTFFRLLLPEAPPKKFLTLGSKFRYSGRTQAQTRRASALIDRPAPYFERSSSKRYTMSRSLDGASVNENHEIYMKDSMSAAEVGTGQYATTKGISQTNLITTVTPEKKAEEERDEEEDKRRKGEEVTPISAIQHEGKTDSERTDTAADGETTATEELEKTQDDLMKHQTNISELKRTFLETSTDTAVTNEWEKRLSTSPVRLAARQEDAPMIEPLVPEEKMETKTESSG

SEQ ID NO: 501 - DNA, 1370 bp, Homo sapiens
ggggcacccactggaaggagaggccaggcggaagaccctggctccgtcatggcctctgccctgaggccaccccgtgtccccaagcctaagggtgtcctgccttcacactactatgagagctttctagagaagaaggggccctgtgaccgggattacaagaagttctgggcaggcctgcagggtctcaccatttatttctacaatagcaatcgggacttccagcacgtggagaagctcaacttgggagcatttgagaaactcacagatgagattccctggggaagctcacgtgaccctggcacccacttcagcctgattctccggaatcaggagatcaagttcaaggtagagaccttggagtgtcgggaaatgtggaaaggcttcatcttaacggtggtggagctccgtgtcccgaccgacttgaccctgcttcctgggcacctatacatgatgtctgaagtcttggccaaagaggaggcgcgccgtgcactggagacaccctcgtgcttcctgaaggtgagccggctggaggcacaactgctcctggagcgctaccccgagtgcgggaacctgctgctgcggcccagcggggacggcgccgacggcgtgtcggtcaccacgcggcagatgcacaacgggacgcacgtggtccggcattacaaggtgaagcgggagggccccaagtacgtgatcgatgtggaacagccgttctcttgcacctccctggacgccgtggtcaactatttcgtgtcgcataccaaaaaggcgctggtgccattcctgttagacgaggactacgagaaggtgctaggctacgtggaagccgataaggagaatggcgagaatgtgtgggtggcgccctccgctccgggcccaggtcctgcaccctgcacaggtggccccaagccgctgtcacctgcgtctagccaggacaagctgcccccactgcccccactaccgaaccaggaagagaactacgtgacccccattggagatggcccagctgttgactatgagaaccaagatgtggcttcctctagttggccagtcatcctgaagccaaagaagttgccaaagcctcctgccaagcttccaaagccacccgttggacccaagccagagcccaaagtctttaatggtggcttgggcaggaagctgccagtcagttcagcccagcctctcttccccacagccgggctggcagacatgacggcagagctacagaagaagctggagaagaggcgggcactggagcactgattcggacacaccagggaccagcgggctagtcccagggcatggcccagcggccagattctttttcccaggattaaaactctgaccccaggaaaaaaaaaaaaaaaaaaaaa

SEQ ID NO: 502 - protein, 403 aa, Homo sapiens
MASALRPPRVPKPKGVLPSHYYESFLEKKGPCDRDYKKFWAGLQGLTIYFYNSNRDFQHVEKLNLGAFEKLTDEIPWGSSRDPGTHFSLILRNQEIKFKVETLECREMWKGFILTVVELRVPTDLTLLPGHLYMMSEVLAKEEARRALETPSCFLKVSRLEAQLLLERYPECGNLLLRPSGDGADGVSVTTRQMHNGTHVVRHYKVKREGPKYVIDVEQPFSCTSLDAVVNYFVSHTKKALVPFLLDEDYEKVLGYVEADKENGENVWVAPSAPGPGPAPCTGGPKPLSPASSQDKLPPLPPLPNQEENYVTPIGDGPAVDYENQDVASSSWPVILKPKKLPKPPAKLPKPPVGPKPEPKVFNGGLGRKLPVSSAQPLFPTAGLADMTAELQKKLEKRRALEH

SEQ ID NO: 503 - DNA, 2845 bp, Homo sapiens
gcgcgagggaggcgagccggagcccgagcactagcagcagccggagtcggcggaaagcacccgggcgcagccggagccggtgccgcagctgcgatggccgtggccgtggggagaccgtctaatgaagagcttcgaaacttgtctttgtctggccatgtgggatttgacagcctccctgaccagctggtcaacaagtctacttctcaaggattctgtttcaacatcctttgtgttggtgagacaggcattggcaaatccacgttaatggacactttgttcaacaccaaatttgaaagtgacccagctactcacaatgaaccaggtgttcggttaaaagccagaagttatgagcttcaggaaagcaatgtacggctgaagttaaccattgttgacaccgtgggatttggagaccagataaataaagatgacagctataagccgatagtagaatatattgatgcccagttcgaggcctacctgcaagaggaattgaagattaaacgttctctcttcaactaccatgacacgaggatccatgcctgcctctactttattgcccctactggacattcactaaagtccctggatctggtcaccatgaaaaagctggacagtaaggtgaacatcattccaataattgcaaaagctgacaccattgccaagaatgaactgcacaaattcaagagtaagatcatgagtgaactggtcagcaatggggtccagatatatcagtttcccactgatgaagaaacggtggcagagattaacgcaacaatgagtgtccatctcccatttgcagtggttggcagcaccgaagaggtgaagattggcaacaagatggcaaaggccaggcagtacccctggggtgtggtgcaggttgagaatgaaaatcattgcgattttgtgaaacttcgagagatgctgatccgcgtgaacatggaggacttgcgagagcagactcacacccgccactatgaattgtaccgacgctgtaagcttgaagagatggggttcaaggacactgaccctgacagcaaacccttcagtcttcaggagacatatgaagcaaaaaggaatgaattcctgggagaactgcagaagaaagaagaagaaatgagacaaatgtttgttatgagagtgaaggagaaagaagctgaacttaaggaggcagagaaagagcttcacgagaagtttgaccttctaaagcggacacaccaagaagaaaagaagaaagtggaagacaagaagaaggagcttgaggaggaggtgaacaacttccagaagaagaaagcagcggctcagttactacagtcccaggcccagcaatctggggcccagcaaaccaagaaagacaaggataagaaaaatgcaagcttcacataaagcctggcaagccaaggatgttcccgcattcacctgcttttgcagtaatatcgtatctctgccatgtgtgttctttagttttattttattttattttatttttttacccttcctcaaacaccagtaactattattaactcgttttgctgaatgttgttgggtggtagaaaatgatagaacaagggaataaccgcgaatgctctgtgcagctggactctgtttccggaaagtaaatgatttgctttttatgcctgttctgaatggcagcacgaagcaggcctgttacttgtatgtcgctttggacagaggaaagtggggtaaaatgctacctgtacgtctgacatgaaaacttctcaccgcctcagcagctgaactaaaaacctgaatagccatgacaagagtttgcattttcttgatgattcatctccatgagtgcacaatccctgaactcactgtcttttctccacacttgtcctaagccaaggtagatttgtacgtagacagactggtgagcaagcattatattttatttttacccttgcatgacattttcattttaatcaataacattatttggcctgagcttgtgggtctgttcagactgtctcctctcatggtttgaaactgcatctgaatgcctgccttcaatcctggccaagttggagtagactggtatgagaaaactatgattagttcacatttactggtgcatccttgatcctctcacagatagaggtcttaaaggttggatcatgtaacattgcttagtagaagaatcttcttctaaggatgatgggctttctacagcctgcttaccactaacagtaaggaatctttcataaacacacctcagtttgttcccagtgggcttagagggaggacctgatgactgattccaggatacttgtacttctaataacatttttcatgaatcatgagaaaatttccacagatacttcccttagaaaatttgctataaactctgtatcattggtagcacaaatttgagcgaggccctgtcaattttaaggtggaaataggaaggaccacaacatgacccgtaagtcaagaaggtagacatttcatatccagcttccttgcttagtctcctttcagtatttggcaataaaagaaagaagaaatagaacagctgaagtctcaaatcattgtctggaattttcctcaccttggctagctccacctgctctttgtctaaggcccttgcctcatcagggattagaactggcccatatgccagaacctgtactaaatgcctaatttgtatggaagagtgcatatttaatctcttttctatactgctcctttctgatgcttatcctttcatctgtgtgattgttttttcccctctactaacaagatcctcccagctttctctctacatgtagaaaggataacatttctcatgaacccactgcccctctgcattttcctcactggttag

SEQ ID NO: 504 - protein, 429 aa, Homo sapiens
MAVAVGRPSNEELRNLSLSGHVGFDSLPDQLVNKSTSQGFCFNILCVGETGIGKSTLMDTLFNTKFESDPATHNEPGVRLKARSYELQESNVRLKLTIVDTVGFGDQINKDDSYKPIVEYIDAQFEAYLQEELKIKRSLFNYHDTRIHACLYFIAPTGHSLKSLDLVTMKKLDSKVNIIPIIAKADTIAKNELHKFKSKIMSELVSNGVQIYQFPTDEETVAEINATMSVHLPFAVVGSTEEVKIGNKMAKARQYPWGVVQVENENHCDFVKLREMLIRVNMEDLREQTHTRHYELYRRCKLEEMGFKDTDPDSKPFSLQETYEAKRNEFLGELQKKEEEMRQMFVMRVKEKEAELKEAEKELHEKFDLLKRTHQEEKKKVEDKKKELEEEVNNFQKKKAAAQLLQSQAQQSGAQQTKKDKDKKNASFT

SEQ ID NO: 505 - DNA, 4608 bp, Homo sapiens
gacagaagtgaatgggaatggagaggccggcggcccgggagccgcatgggcccgacgcgctgcggcgcttccagggactgctgctggaccgccgaggccggctgcaccgccaggtgctgcgcctgcgcgaggtggcccggcgcctggagcgcctgcgcaggcgctccctcgtagccaacgtggccggcagctcgctgagcgcaacgggcgccctcgccgccatcgtggggctctcgctcagcccggtcaccctggggacctcgctgctggtgtcggccgtggggctgggggtggccacagccggaggggccgtcaccatcacgtccgatctctcgctgatcttctgcaactcccgggagctgcggagggtgcaggagatcgcggccacctgccaggaccagatgcgagagatcctgagctgcctcgagtttttctgccgctggcagggctgcggggaccgccagctgctgcagtgcgggaggaacgcctccatcgccctgtacaattctgtctacttcatcgtcttctttggctcacgtggcttcctcatccccaggcgggcggagggggacaccaaggttagccaggccgtgctgaaggccaagattcagaaactggccgagagcctggagtcctgcaccggggctctggacgaactcagcgagcagctggagtctcgggttcagctctgcaccaagtccagtcgtggccacgacctcaagatctctgctgaccagcgtgcagggctgtttttctgagaacatcctttccccctaatgaccgaggccagcaaatcatcctcatgggatgctccagaatttgtagctcccttaggaaaacaccaagctgggttaggagccgaaggcaaaggatgagaaaaactgtttttgaagtgggcaggtccccaaagcccttcttttcccatcactgtgacatctgcctgggcttgagtgctacggacttttcagtcttcctagtggaaaaatgtgacccaaaaactccttttcctttatcaaaaactttctgtctaaacacagctgggcaggcactcctgttttaaagttatttcggggtccctgaccctgccctggtggcttggcctgagactggagagagtgccatcctctgggtcctctccaagtcctactagtctttgaagtcctcaaaatgtgcgtgaggaaggcatttgcctctattccagaatttctgatacaaagaactccagaatccagagcaaatcagcccttctctgaacgttgtaggatggttcagaacccagagaggaccctggtgctgatatctcctcctcttccctttcccctcagcttacttactcccagatgcggcctgggtatgaagtaggcctttcctgagtggctcccaatccagtcctccaagtactcagaggggaagcccgtgaagccgtcatctaagtcctgctccctcacatgaagctgagggccagatagatggagcgactgccaacttcatttcccgacatcattgtgttcagaagagagtgatgggttttgagttagacagtcctgggcttgagacaggctttgtcactactgtgtgagtgtagccacctaatctctctgagactgtgtaaaacaaagatgataaaatctcaccctgttgtgagatattaaatgagccaaagtgcctagcatgatggtgctggctcatatagtgtagtccctggaatggcaaattaacatcacccaggaacttgttagaaaggcaaattcttggacacaaccctcctgatttatggaatcagaaactctggctgtggggcccagcaacctgagtttaaacaatttctctgggtggttctgcggcacactaaggtttgaaaatcactacaacaaatgctaacttctaatccccttgatgagctttcacgaagtctcacggcttctctagggactccatggtcttcagagtcgttcacagatgaccaaggacagactgtgtcccagaagccaaaatgagagagagagagagagcacgcgtacgtgcaccctggggcagtgtctcaccgtatgaataagggatgtaacactaaaagcccattagggggcagtgtttcccgcctgttgtagaaactggtacagaaaggatcctatatgaagttcctgaaactgacctttgtctattattaccttctctgaaaagtgccagtccatgtattttttatttattttaagtttgtaatttaatttttaattattgtttagtgtttgcatttaattttatttaatcaccacatttagaaaataataagagcaagtttctaaatgggagactgctgaggctctttgcaagagatgagattaagtttgagtttctaaggcagggcatgagctggaaatagcattgctttccttgattgtctctctccttcagggagattctttttctctagtgttttaagtgatcctttgaagtaagtgtggagagtcttgaatggcaagaccaggagctgagtttaagcttgtaatggaagcttgcattgtgggatatataactgaggaagcatatttatcctgaaggtattttgccagaaggtatcacttgacctggaaaaggaatctatttagttcaggaaagataaaaagtttagaggtatgtgaaggaagcacttagaacttgcaagcctgatgtcctatcaagttatgtcttctgggtgacagacaaaatagcttgtcttatggtggtgatgtgttgcattttcactttggggtctgtaagaaactgtcagtgaaaatatgtacaattccttcaatttccattcttaacaactgtaatgttgaaaaataagttgaaaagtctttgggaccatacatgcaaaaacggtgcctctgttacttaattatttaatattctataaatgtacccaatctgtccgcacccttcccagtgatggggcagtatgtctgaggaagtataatttcagtactggggtcggggagaggaggtgatgtttctacatttttattttttctataaattgcaattggtctgtatgctggtttattttgaaatttatattggtttcttttcaagctggtgtcatctcctagactgtttcacccagatgctagcattttttttttttttgagacagagtctcactctgtcacctaggctggagttgcagtggtttgatctcggctcactgcaacctccgactcctgggttcaagcaattcttctgcctcagcctcctgagtagctgggattacagatgtgcaccagcacacccggctaattttttgtatttttagtagagacagggtttcgccatgttggccaggctggtcttgaactcctggccttatgtgatccgcccaccttggcttcccaaagtgctgggattacaggcatgagccacctcgcctggccagatgctagcattttagatcaaacaattcattttagatgaattgttttgtttcacaatcattttaaatcattttagaatgtacttcacattattagttgtgttatggcataaaggtacaaccattccctaactccatcttttattaatgcttaagtttaaattatattcttccaatgcctaagctattccctagaattaaactgggcacttttggaagcagcaacagtaacagcagcagcaaacttttcctctcatattttgggtgtatcaaaagttctagacttttgaagttatgatttcagtggcccactttatttctaaggaagagtgtctactttggaacgatactttgcacatagtaggaactcaagaaatacatttgaataattataattaactgtttagctatcttaatgagaatttgttgacaacaaaagatcatccatcgccttatgtgtgagtaagattggagcctctatcaagatttagtcaagttcagttagattgattctagaaacaaatatttatttctttcttttacggggatgtgaataaggcttttccttaaggccttcattctttaaacaaacaggttgaaatggtatgttgtaaaagagaagacgggagagaggtatttagatgataagtgtacttcacaaaaatgccaaagtttgaaaaataggtatgtttgttctaaatgtttaagtgcttctctgttaggttctggggcttgcaatcatttgaattgttctgtttcacaataaaggagattcactgggttctgcattttcaggattcaatagaactgctccattaaaaaaataatccttagcaagcattcgaatcctaactgctttgatgcacttgccctcgggcacctgtcatttccaatatggtaggtgtcaaagtcaaaagtatttactgggagaaaaaagagaggagtggttgtagaagtctccctaaatcagacatgtcaagcaatcagccaacgtggtgtatttctcattcaatattttagtgtgaattgagacactgagataaagacatcgtgcagagataaatggggatacagttaaatgtagcaactcttgagttcattttttcccactgtagcaaaattaatgctttctctttattgaaataaattgctcattcctccaaaaaaaaaaaaaaaaaaaaaaaaaaaaaaaaaaaagg

SEQ ID NO: 506 - protein, 248 aa, Homo sapiens
MGMERPAAREPHGPDALRRFQGLLLDRRGRLHRQVLRLREVARRLERLRRRSLVANVAGSSLSATGALAAIVGLSLSPVTLGTSLLVSAVGLGVATAGGAVTITSDLSLIFCNSRELRRVQEIAATCQDQMREILSCLEFFCRWQGCGDRQLLQCGRNASIALYNSVYFIVFFGSRGFLIPRRAEGDTKVSQAVLKAKIQKLAESLESCTGALDELSEQLESRVQLCTKSSRGHDLKISADQRAGLFF

SEQ ID NO: 507 - DNA, 2308 bp, Homo sapiens
aagccactttgacaacgtttctgagccaggggtgaccatgacctgctgcgaaggatggacatcctgcaatggattcagcctgctggttctactgctgttaggagtagttctcaatgtgatacctctaattgtcagcttagttgaggaagaccaattttctcaaaaccccatctcttgctttgagtggtggttcccaggaattataggagcaggtctgatggccattccagcaacaacaatgtccttgacagcaagaaaaagagcgtgctgcaacaacagaactggaatgtttctttcatcacttttcagtgtgatcacagtcattggtgctctgtattgcatgctgatatccatccaggctctcttaaaaggtcctctcatgtgtaattctccaagcaacagtaatgccaattgtgaattttcattgaaaaacatcagtgacattcatccagaatccttcaacttgcagtggtttttcaatgactcttgtgcacctcctactggtttcaataaacccaccagtaacgacaccatggcgagtggctggagagcatctagtttccacttcgattctgaagaaaacaaacataggcttatccacttctcagtatttttaggtctattgcttgttggaattctggaggtcctgtttgggctcagtcagatagtcatcggtttccttggctgtctgtgtggagtctctaagcgaagaagtcaaattgtgtagtttaatgggaataaaatgtaagtatcagtagtttgaattaatttgagaagtacacttgttttcaaagtcatctttgagatgatttaaaaaatcaacccttcacgtagaaagcacgttgtaaatgcataacactctcatatcagtggttgatttgggaaaggtggagagaattttcaattagttttgtgttgtactattcaaattttttacctcttcactgtgtgtagagaaaggagaagggaaggaggatgagaaggaacggaagtcatcctgaaaataaaagtacaggactttttttttttttttttgagacagggtctcaaaaaaggctggagtacagtagtacagtggtgctatctcagcttactgcagcctcaacctcctgggctcaggtgattctcccatctcagcctccctagtagctgggactacaggtgcgtgccactatgccaagctaatttttgtatttttagtagagatgggggttttccatattgcccaggctggtcccgaactcatggactcaagtgatctgcctgcctcagcctcctaaagtgctgcgattacaggcatgagccatcgcgcctaaaggacaggacctttttattgtatttctttaaagaataaatacataacctgaatgcaatcaagtctttagatctaattctcagcttgcagggaacactaggacaaatccaaaaagtgggtcagcgggcacagaatggcccaattttcaacaggaaaatgttataaaagaaaaatatttttgagggaactgttatagattaagagaatagaggcatgtttcagctaaacacatgtaaactttgtcagagataattgggaggagtatgtagaagaatcggattattgttaattttggtaggtctgataatggttttatagtataaaggctgagtaccccttatccaaaatgattaagatcagaagtgttttggctttcacatttttttggattttggaattttgcctataataatgagacatcttggggatgggatgcaagtctaaccacaaaattcatttatgtctcatacacactttgaacacctggcctgaaggtaatttcacacaatattttaaataactttgtgcatgaaacacaattttgactgcattttgactgcaactcatcacatgaggtcaggtatggaattttccacttgtggtgttacgttactggctcaaaaagttttggatctcggagcattctggattttgaatttttggattagtgatgctcaacctgtatacagaaatgtcctcatttttaaaaaaagaaatgcatatttatatgttttaaaattacttcaaccaaaagcaacggggagatgtttactgttatatttaggtgacaggtacatggcaattcattataccctcctattttcctatgtttacattattcattaattaaaaaacaatacctagaaaaacccaagactttcaaaagctattttctatatgtgccaatctttaaaaaacaggataacaagggtatttatcacattaaaatgttgtaaaacagcaaagctaaaatctaaaaaaaaaaaaaaaaaa

SEQ ID NO: 508 - protein, 229 aa, Homo sapiens
MTCCEGWTSCNGFSLLVLLLLGVVLNVIPLIVSLVEEDQFSQNPISCFEWWFPGIIGAGLMAIPATTMSLTARKRACCNNRTGMFLSSLFSVITVIGALYCMLISIQALLKGPLMCNSPSNSNANCEFSLKNISDIHPESFNLQWFFNDSCAPPTGFNKPTSNDTMASGWRASSFHFDSEENKHRLIHFSVFLGLLLVGILEVLFGLSQIVIGFLGCLCGVSKRRSQIV

SEQ ID NO: 509 - DNA, 4204 bp, Homo sapiens
cagatttgttggagcaacaggacattgatctaagccctgacttggcagctacttacggcccaacagaagaagctgcccaaaaggttaaacactattatcgcttttggatcctaccccagctgtggattggcattaactttgacagactcacacttttggccctgtttgatagaaatcgtgagatcctggaaaatgtgttagctgtcatcctggctattctcgtggcctttttgggatctattcttctcatacaaggattcttcagagatatctgggtcttccagttctgcctcgtcatagccagctgtcaatactcactgcttaagagtgttcaaccagattcttcttctcccagacatggtcataatcgtatcattgcctacagtagaccagtttatttctgcatatgttgcggtcttatttggctcttggattatggtagcagaaacctgactgcaaccaagttcaaattatatggaataactttcaccaatccactggtgtttatatcagccagggatttagttatagtgtttacactctgtttcccaatagtgtttttcattggtctcctgcctcaggtgaatacatttgtaatgtacctttgtgaacaattggatattcatatttttggtggtaatgccactacaagcctgcttgcagcactttacagttttatctgtagcattgttgcagtagccttattgtatggattatgttatggggctttaaaggattcttgggatggccagcatattccagtacttttctccattttttgtggtttattagtggcagtgtcttaccatctcagccgacaaagcagtgatccatctgtacttttctctttagtgcaatccaagatttttccaaaaacggaagagaaaaatccagaagaccctctatctgaagtaaaagatccactgcctgaaaaacttagaaattctgttagtgagcgattacagtctgacctggtagtatgcattgtaattggtgtgctgtattttgctattcatgtaagcacagtcttcacagtattgcagcctgccctcaagtatgtgttgtatacattggttggctttgtgggttttgtaacccattatgtgctgcctcaagttagaaaacagctaccatggcactgtttctctcatcctctgctaaagacactagagtataatcagtatgaagttcgaaatgcagccactatgatgtggtttgagaaacttcatgtgtggcttctttttgtggagaagaatataatctatccattgattgttctcaatgaactgagcagcagtgcagagacaattgctagtccaaagaaactgaatacagaattaggtgctttaatgatcactgttgctggtttgaagttgctacgatcctcttttagcagccctacatatcagtatgttacagtcatctttactgtgctgtttttcaaatttgactatgaagctttttcagagaccatgctgttggatctcttctttatgtccatactcttcaacaagctttgggaactactttataaattgcagtttgtgtatacctatattgccccatggcagatcacatggggttctgctttccatgcttttgctcagccttttgcagtgcctcattcagccatgctgtttattcaggctgctgtctcggccttcttctctactccactgaacccctttctgggaagtgcaatattcatcacttcatatgtccgacctgtgaaattctgggagagagactataacacaaaacgagtggatcattcaaataccagattggcttcccagcttgatagaaatccaggtacctactgtcaacaacgggaagtggaggccattactgaaggtgtagaggaagatgaaggattttgctgttgtgaacctggccatattcctcacatgctttcatttaatgctgcatttagccagcgatggctagcttgggaagtgatagtcacaaagtacattctggagggttatagcatcactgataacagtgctgcttctatgcttcaagtctttgatcttcggaaagtactcaccacttactatgtcaagggtatcatttattatgttacgacctcgtctaagctagaggagtggctagctaatgagacaatgcaggaaggacttcgtctgtgtgctgatcgcaattatgtcgatgtggacccgacctttaatccaaacattgatgaagactatgaccaccgactggcaggcatatctagggagagtttctgtgtgatttacctcaactggatagagtactgctcttcccgaagagcaaagcctgtggatgtggacaaagattcatccctagtgactctctgttatggactctgtgttctgggacggagagctttggggactgcatcccatcatatgtccagtaatttagagtcattcctctatggattgcatgccctatttaaaggagatttccgtatttcttcaattcgagatgaatggatctttgctgacatggaattgctaagaaaagtagtagtccctgggatccgtatgtccattaaacttcatcaggatcattttacttctccagatgaatatgatgaccctactgtgctctatgaagccatagtatctcatgagaagaacctcgtaatagcccatgaaggggaccctgcatggcggagtgcagtacttgccaactctccctccttgcttgctctgcggcatgtcatggatgatggcaccaatgaatataaaatcatcatgctcaacagacgctacctgagcttcagggtcattaaagtgaataaggaatgtgtccgaggtctttgggcagggcaacagcaggagcttgtttttctacgtaaccgtaacccagagagaggtagcatccaaaatgcaaagcaagccctgagaaacatgataaactcatcttgtgatcaacctattggctacccaatctttgtctcacccctgacaacttcttactctgacagccacgaacagcttaaagacattcttgggggtcctatcagcttgggaaatatcaggaacttcatagtgtcaacctggcacaggcttaggaaaggttgcggagctggatgtaacagtggtggcaatattgaagattctgatactggaggtgggacttcctgcactggtaacaatgcaacaactgccaacaatccccacagcaacgtgacccagggaagcattggaaatcctgggcagggatcaggaactggactccacccacctgtcacatcttatcctccaacactaggcactagccacagctctcactctgtgcagtcgggcctggtcagacagtctcctgcccgggcctcagtagccagccagtcttcctactgctatagcagccggcattcatccctccggatgtccaccactgggtttgtgccttgtcggcgctcttctactagtcagatatcgcttcgaaacttgccatcatccatccaatcccgactgtcgatggtgaaccaaatggaaccctcaggtcagagcggcctggcctgtgtgcagcacggcctgccttcctccagcagctccagccaaagcatcccagcctgcaaacatcacactctcgtgggctttcttgcgacagagggaggtcagagcagtgccactgatgcacagccaggcaacaccttaagtcctgccaacaattcacactccaaaaaggcagaagtgatttacagagtccaaattgtggatcccagtcaaattctggaagggatcaacctgtctaaaaggaaagagctacagtggcctgatgaaggaatccggttaaaagctgggagaaatagctggaaagactggagtccgcaggagggcatggaaggccatgtgattcaccgatgggtgccttgcagcagagatccaggtaccagatcccacatcgacaaggcagtgcttctggtccagattgatgataaatatgtgactgtaattgaaactggggtactagaacttggggctgaagtgtgagccagtgtttattataaagacatttctttttccctctcaattccaaggcattggaaaaagagaggaacaagcagaagatgcctgcaggtatcactttgatcctatgtgggagcgactgaaaatagaatgagcttggttaagcacctctcctttgcccttcaccctgactcctgtcactgtctccatccccaaataaagctgaaatatttttttaagtt

SEQ ID NO: 510 - protein, 1327 aa, Homo sapiens
DLLEQQDIDLSPDLAATYGPTEEAAQKVKHYYRFWILPQLWIGINFDRLTLLALFDRNREILENVLAVILAILVAFLGSILLIQGFFRDIWVFQFCLVIASCQYSLLKSVQPDSSSPRHGHNRIIAYSRPVYFCICCGLIWLLDYGSRNLTATKFKLYGITFTNPLVFISARDLVIVFTLCFPIVFFIGLLPQVNTFVMYLCEQLDIHIFGGNATTSLLAALYSFICSIVAVALLYGLCYGALKDSWDGQHIPVLFSIFCGLLVAVSYHLSRQSSDPSVLFSLVQSKIFPKTEEKNPEDPLSEVKDPLPEKLRNSVSERLQSDLVVCIVIGVLYFAIHVSTVFTVLQPALKYVLYTLVGFVGFVTHYVLPQVRKQLPWHCFSHPLLKTLEYNQYEVRNAATMMWFEKLHVWLLFVEKNIIYPLIVLNELSSSAETIASPKKLNTELGALMITVAGLKLLRSSFSSPTYQYVTVIFTVLFFKFDYEAFSETMLLDLFFMSILFNKLWELLYKLQFVYTYIAPWQITWGSAFHAFAQPFAVPHSAMLFIQAAVSAFFSTPLNPFLGSAIFITSYVRPVKFWERDYNTKRVDHSNTRLASQLDRNPGTYCQQREVEAITEGVEEDEGFCCCEPGHIPHMLSFNAAFSQRWLAWEVIVTKYILEGYSITDNSAASMLQVFDLRKVLTTYYVKGIIYYVTTSSKLEEWLANETMQEGLRLCADRNYVDVDPTFNPNIDEDYDHRLAGISRESFCVIYLNWIEYCSSRRAKPVDVDKDSSLVTLCYGLCVLGRRALGTASHHMSSNLESFLYGLHALFKGDFRISSIRDEWIFADMELLRKVVVPGIRMSIKLHQDHFTSPDEYDDPTVLYEAIVSHEKNLVIAHEGDPAWRSAVLANSPSLLALRHVMDDGTNEYKIIMLNRRYLSFRVIKVNKECVRGLWAGQQQELVFLRNRNPERGSIQNAKQALRNMINSSCDQPIGYPIFVSPLTTSYSDSHEQLKDILGGPISLGNIRNFIVSTWHRLRKGCGAGCNSGGNIEDSDTGGGTSCTGNNATTANNPHSNVTQGSIGNPGQGSGTGLHPPVTSYPPTLGTSHSSHSVQSGLVRQSPARASVASQSSYCYSSRHSSLRMSTTGFVPCRRSSTSQISLRNLPSSIQSRLSMVNQMEPSGQSGLACVQHGLPSSSSSSQSIPACKHHTLVGFLATEGGQSSATDAQPGNTLSPANNSHSKKAEVIYRVQIVDPSQILEGINLSKRKELQWPDEGIRLKAGRNSWKDWSPQEGMEGHVIHRWVPCSRDPGTRSHIDKAVLLVQIDDKYVTVIETGVLELGAEV

SEQ ID NO: 511 - DNA, 2118 bp, Homo sapiens
aaaaaaaagaaaccaggcggcgcgttcccggtggcggcgccctggactcccgggcccgcgcatccccgccagccttccttaaggcggatgggtggcccccgagaccccgtcggacccatggtttccagtgcagcgcggagtgggcggtgccagcgtgccaggagccatgtctgaccaggacgtttggaagatcatatccatgccagaggctcttgtggggagatgagttggtaaagagagaggctgggatgaagatgctgccaggagtggacgtgtttgggactggcagctccgcccgagttctggtcccactgctgagggcagaagggttcactgttgaggccctgtgggggaagactgaggaggaggcgaagcagcttgctgaggagatgaacatcgccttctacaccagccggactgatgacatcttgctgcatcaagatgtggatctggtgtgcatcagcatcccccctccactcacccggcagatatccgtgaaggctctaggtattgggaagaatgtggtttgcgagaaggcagcaacatcggtggatgccttccggatggtgacagcctcgcgctactacccgcagctcatgagcctggtagggaacgtgctgcgcttcctgcctgccttcgtgcgcatgaaacagctgatttcggaacactatgtgggagcggtgatgatctgtgatgcccgcatctactcaggcagcctgctgagccccagctatggctggatctgtgatgagctcatgggcggcgggggcttgcacaccatggggacctacattgtggacctgctgacccacctgaccggccggagagccgagaaggtgcacgggctgctcaagacattcgtgaggcagaacgctgccatccgtggcatccggcacgtcactagcgatgacttctgtttcttccagatgctcatgggtgggggtgtgtgtagcacagtgacactcaacttcaacatgccaggcgcctttgtgcatgaagtcatggtggtaggctctgcaggacgcctcgtcgcccggggagccgacctctatgggcagaagaactctgccacgcaagaggagctgctcttgagggactcgctggcagtgggcgcaggactgcctgagcaggggccccaggatgtcccgctgctgtacctgaagggcatggtctacatggtgcaggccttgcgccagtccttccaggggcagggcgaccgccgcacctgggaccgcacccctgtctccatggccgcctccttcgaggatgggctgtacatgcagagcgtggtggatgccatcaagaggtcgagccgatccggggagtgggaggctgtggaggtgctgacggaggagcccgacaccaaccagaacctgtgtgaggcacttcagcggaacaacctatgagcctgcacctgggctccttgccacagggcagagggaccagggaggggaacaggagccagacatgacagggacttggccctagcagagacagtgtctttcatttgatgagtctgggtgaagccagaggtggctctgggacttcgccccctccagtggctcacctgctcctcagacttgcagggtggcaaatgttcctgttgccaggttaccacggtgtgcacagggcagagctgccgccaggcctcctcatggtgatgccagtgagtcggaccaggaaaggctcaccctggggagcccttcagcctgatccgcagtcctaacagggtgagaaagcacaagaggggccagctcggctgaggcctgaggagaaatgatgagaagttttgtttcgttcttgggctggggcatctcaggaacagtgagggcaacaagctgtccctcagggaccctcacctgccctcccatgtgaccaggcccttcccaggtggggactggggcttgctttattaagtgagctcttgggcttttgaagtaggacagagggccctggtttggcagagaggaggcaagggagggctttagaacatctgagaaatgttaataaataattcagaaaataaaaaaaaaaaaaaaaaaaaaaaaaaaaaaaaaaaaaaaaaaaaaaaaaaaaaaaaaaaaaaaaaaaaaaaaaaaaaaaaaaaaaaaaaaaaaa

SEQ ID NO: 512 - protein, 385 aa, Homo sapiens
MKMLPGVDVFGTGSSARVLVPLLRAEGFTVEALWGKTEEEAKQLAEEMNIAFYTSRTDDILLHQDVDLVCISIPPPLTRQISVKALGIGKNVVCEKAATSVDAFRMVTASRYYPQLMSLVGNVLRFLPAFVRMKQLISEHYVGAVMICDARIYSGSLLSPSYGWICDELMGGGGLHTMGTYIVDLLTHLTGRRAEKVHGLLKTFVRQNAAIRGIRHVTSDDFCFFQMLMGGGVCSTVTLNFNMPGAFVHEVMVVGSAGRLVARGADLYGQKNSATQEELLLRDSLAVGAGLPEQGPQDVPLLYLKGMVYMVQALRQSFQGQGDRRTWDRTPVSMAASFEDGLYMQSVVDAIKRSSRSGEWEAVEVLTEEPDTNQNLCEALQRNNL

SEQ ID NO: 513 - DNA, 2678 bp, Homo sapiens
ggcctcgagcgccccggcgggaggtttttctatatgagtggagaagacagctgttaccagggaggtcatacaacatttttttaggatgtctgaagatgaagaaaaagtgaaattacgccgtcttgaaccagctatccagaaattcattaagatagtaatcccaacaaacctggaaaggttaagaaagcaccagataaatattgagaagtatcaaaggtgcagaatctgggacaagttgcatgaagagcatatcaatgcaggacgtacagttcagcaactccgatccaatatccgagaaattgagaaactttgtttgaaagtccgaaaggatgacctagtacttctgaagagaatgatagatcctgttaaagaagaagcatcagcagcaacagcagaatttctccaactccatttggaatctgtagaagaacttaagaagcaatttaatgatgaagaaactttgctacagcctcctttgaccagatccatgactgttggtggagcatttcatactactgaagctgaagctagttctcagagtttgactcagatatatgccttacctgaaattcctcaagatcaaaatgctgcagaatcgcgggaaaccttagaagcggacttaattgaacttagccaactggtcactgacttctctctcctagtgaactctcagcaggagaagattgacagcattgcagaccatgtcaacagtgctgctgtgaatgttgaagagggaaccaaaaacttagggaaggctgcaaaatacaagctggcagctctgcctgtggcaggtgcactcatcgggggaatggtagggggtcctattggcctccttgcatgcttcaaagtggcaggaattgcagctgcacttggtggtggggtgttgggcttcacaggtggaaaattgatacaaagaaagaaacagaaaatgatggagaagctcacttccagctgtccagatcttcccagccaaactgacaagaaatgcagttaaaaaccaaatttcagtattattggtgccaacatgtctatcctgaggacctttgctgctgttggacactccgtcaccttttggaacacaagtatatcaagatagtggctactgatgttcaagtgggattgaagtgtgataaatggatatattttgttgtttgctggggtgttcatggagatgttaagagattgaggccctgggctgagggtatataatgtatgtcaggtaaagtttgaagactgccaaggagcagattttctccctggaaatgtgaaaactgaacctataactctgataaggacttgagatgtgtagaaacgttgggttatggaagactagtttcttccataaccctgaattggagaccttaatgctaagtgtagattattgaggtttgttagtgaggaaaagaataagagttcagaagcctttgttatcagatagcgaaatcagggcctagtgaggagcacaggtcgactacataatggagtccattggcgaaccctattgcaatttggtccaactatatcttctggtgaaggaaattaatgatgtaagaaaatgcaagaggctcaacttctcttccaaaaatcttctggcttctgaactcttcctctgcctctctttaaataaataacacagaatttcaagtggtaggagacttattaagccagtcaccaagcttggtctgtcagcctgtcttctaacacctcaaagatcttgtgccctgtgctgtccctcccttgtaattatgaaaagttctttggtttctggggtgaactctacccatgtataatgaggaattctctcataaccttttttgtcttgtctgtcatctctgttcatcccctcctataacctctaggtaaaaagaaaagaaaaaaagaaatttcgagatattttcaacattgttagagtttgggctaaaatgagcaaggagaaaaaaaccaccaagaacatttcctggggcatgttccagttttgaggggtgatatatctgccagatagggggtatctgacccagtcttcttttcagctggtctctggggggagctgagaactcgcttgctacctcacatccttttccccagactttttatctcctatgcatccctttgctttctatagctggtgtttcttccccaaaatggcgttcccatgcttacctttctcacattctagacaatgatggacaaagacgcatgcaagactcagacccggggaatggtgtggtgctaatctcaacacctgacattcacagcaagcatggcccagcccaaccgcatgtctatctcaaaccgcagaaaggctttaatactggaaaaaaagaattcaagactacaggcagctcccctctgtaccccaactcatttaaaataggaggaatcactttttgccttacttaacgcttttttctgagcacagggatgggcacctgcaccccagaaggtgtgagctgtctctctgccaggagctaaggttcattaggggattggatggtttatcacttctttctttctgagtttacttttagtaacttttattgatggctacctttcatgtccctgtctaaagagactttctctttcatacgtcttaaatctcatcaatgaaatccagtgaaacagcaccatttcttagtatcattaaataactagaaagtatcaaaaaaaaaaaaaaaaaa

SEQ ID NO: 514 - protein, 302 aa, Homo sapiens
MSEDEEKVKLRRLEPAIQKFIKIVIPTNLERLRKHQINIEKYQRCRIWDKLHEEHINAGRTVQQLRSNIREIEKLCLKVRKDDLVLLKRMIDPVKEEASAATAEFLQLHLESVEELKKQFNDEETLLQPPLTRSMTVGGAFHTTEAEASSQSLTQIYALPEIPQDQNAAESRETLEADLIELSQLVTDFSLLVNSQQEKIDSIADHVNSAAVNVEEGTKNLGKAAKYKLAALPVAGALIGGMVGGPIGLLACFKVAGIAAALGGGVLGFTGGKLIQRKKQKMMEKLTSSCPDLPSQTDKKCS

SEQ ID NO: 515 - DNA, 2138 bp, Homo sapiens
agggacttttgctcccacaagtcctgcctcggaggcgggggagctggaccagcagccgcctggagcgtccgagtcaccgtcgccggggctcccgcgctccccagaacggtgggacgcggggctcggcagccgccagcggaacatggcgccctggacgctgtggcgctgctgccagcgcgtcgtgggctgggtgccggtgctcttcatcaccttcgtggtcgtctggtcctactacgcgtacgtggtggagctctgcgtgtaccacgttgatgagcgaacaatatgcaatggaattgccccagaaaaagatgtagatggatttcatattatcaatattggaagattgtgccttgatcagcattctctcatacctgccactgccagtgctgtttgggaaataataaaaagaacaggaattcaaacatttggaaaaaatgtggttgtggctggaagatccaagaacgtagggatgcctattgccatgcttttacacactgatggagagcatgaacggccaggaggtgatgcaactgtgacaatagctcacagatacacccccaaagagcaactgaagattcatacgcagctggcagatattatcatagttgctgcaggtattccaaagttgattacgtctgatatggttaaagaaggtgctgctgtaattgatgtgggtatcaactatgtccacgatccagtgacaggaaagacaaaattagttggagatgtggacttcgaagctgttaaaaagaaagctggctttatcactccagttccaggaggtgtgggacccatgacagtggcaatgcttctgaagaacacccttctggcagctaaaaaaatcatttactagatcacatgaaaggataaagcaaactgaagtcatgctatttgtttatttgacaaagggtaaaacctttatattttactacaaagctatttatttctacatggtatttattttttcatgggtgaaatcattgtgaatcaattgattcacatagttttatgcatttcctgctaatttattttgagttttaagaaaacaaccaaaacaattccaatgaaaattttagtaacaattgtttattttgagggtatttgttcataacattaaaacaataaagggctcataataaataaatatatttttgacacaattaaatattacatagagtatgtttacaacaaatatcctgtcagccaaatggttacccatataaaatgtaatttaggttttgctacttgcatgctaacatttttaatgtattttatgatctatgtcatatattaaaaaagagcttgcttactacaagaaaaatattgaaatattgaaaatattgaaaatattattattgaaaataaaatcttgatctcaactatcccccaaatgcatcctataagtccatcctaatgagaaatgatgttctatttaaggaaaggaaaatattccgggaaggcaaaaaatgcagtgctgtttggaagtgtaatgattttatcacatggtgaatgactactaagagtaatgattatatcacattgtgaatgactacttgccacagtaaaaatacatgaagaatgtgttaggtttaaacgtcgtttctttcttctaaaaaatatttggttagtaccttcactgagcaatagtggaaaaataaaaaaataagtaaacagaaaaaactaaagttgtattttcccacaaatatagtatgaatgaggtcatattaaagaacagcaactgttaatgtttgttcacaaattcagaaatctaataggaaaaatgatactttcaatgtgccaaaactaaaccttagtatacaactaaaaatctcctgccttcttgcctacctgtcttccctcttctgttacagaatttgttcctcaaagtagatgcaatgtttctaacacaatttaaattaggaaatatatatgaatgtcgttgaagtctattttgagactgctaaagctattaattgatactgtgtttttatgcccaaatcccagtatgtttatgtaccaataatgactcttacccagcgcatgtctttatcagtgtgtactcgtgacgatttgtgtgaaaatagacttgatgtttataattaataccattacaactgtataataaaagcaatttgaag

SEQ ID NO: 516 - protein, 236 aa, Homo sapiens
MAPWTLWRCCQRVVGWVPVLFITFVVVWSYYAYVVELCVYHVDERTICNGIAPEKDVDGFHIINIGRLCLDQHSLIPATASAVWEIIKRTGIQTFGKNVVVAGRSKNVGMPIAMLLHTDGEHERPGGDATVTIAHRYTPKEQLKIHTQLADIIIVAAGIPKLITSDMVKEGAAVIDVGINYVHDPVTGKTKLVGDVDFEAVKKKAGFITPVPGGVGPMTVAMLLKNTLLAAKKIIY

SEQ ID NO: 517 - DNA, 4557 bp, Homo sapiens
ccaagatgcagatgtagcagaaactccacatcccatgtttacaaaatatggcaacagtttacttgaagaagccagaggagaaataagaaatttagaaaacgttattcagtcacaaagaggccagatagaggagttagagcacttggctgagatcctgaaaactcagttgaggagaaaagaaaatgaaattgagttatctcttcttcagcttcgagaacagcaagctacagatcaaaggtcaaatattcgggacaatgtagaaatgattaagcttcataaacagctagtagagaaaagcaatgctctttcagcaatggaaggaaaatttattcagcttcaagagaagcaaagaactctcaaaatcagccacgatgctttgatggcaaatggggatgaattaaacatgcaacttaaagagcagcgtttaaaatgctgcagtcttgagaaacaattacattctatgaagttttctgaaagaagaatagaagagctgcaggatagaattaatgatttagaaaaggaacgggaacttttaaaggaaaactatgataaactttatgacagtgccttcagtgctgcccatgaagagcaatggaagttaaaggagcaacagctgaaagtgcagattgctcagctcgagactgccttgaagtctgacttaacagacaaaactgaaatccttgacagattaaaaactgaaagagatcaaaatgaaaaactcgttcaagagaatagagaactacagttacagtatctggaacaaaagcaacaacttgatgaacttaaaaaacgcataaaattgtacaaccaggagaatgatattaatgctgatgaattgagtgaagctctcctacttataaaggctcaaaaagaacaaaaaaatggagacctttcctttttagtgaaagtagatagtgaaattaataaagatctagaacgctctatgagagagctgcaagcaactcatgcagaaacggtgcaagagctggaaaagacaagaaacatgctaattatgcaacacaaaattaataaagattatcagatggaggttgaggcagtgacccgtaagatggaaaatttgcagcaagattatgaactcaaagtggaacagtatgttcatcttcttgatatcagggctgcacgtatccataaactagaagcccaattaaaggatattgcctatggcaccaagcagtacaaatttaaaccagaaatcatgccagatgactctgttgatgaatttgatgaaaccatccacttagaacgaggcgaaaatctatttgaaatccatatcaacaaagtaaccttttcttctgaagttttacaggcatctggagataaagagcctgtcactttctgtacctatgctttctatgattttgaactacagacaactcccgtagtgcgaggccttcatcccgaatataacttcacttctcaatatcttgttcatgttaatgacttatttttgcaatatattcagaagaatactatcacccttgaggtccaccaggcttatagcacagaatatgaaacaattgcagcatgtcaattaaaatttcacgaaattcttgaaaaaagcggccgaatattttgtacagcaagtttgattggaacaaaaggagacatcccaaattttggcacagtggaatactggttccgattaagagttcccatggatcaagcaattcgactttatcgagaaagggcaaaggctttggggtatataacatcaaattttaaggggccagagcatatgcagtcgttaagtcagcaagcacccaaaactgctcaactcagttctacagattccacagatggcaacttaaatgaacttcacattacaataagatgttgcaaccacctgcagtcccgagcaagccacctgcagccacacccatatgttgtgtacaagttttttgattttgcagaccatgatacagctatcattcccagtagcaatgatccacagtttgatgatcatatgtatttcccagtgccaatgaatatggacttggatcgataccttaagtcagagtctctgagtttttatgtttttgatgatagtgatacccaggagaatatttacataggaaaagtcaatgtgcctctgatttcgttggcacatgacaggtgtatctcaggaatatttgagttaacagaccatcaaaagcatcctgctggcaccatccatgttatattgaaatggaaatttgcttaccttccaccaagtggatcaataacaactgaagacttaggaaatttcattcgcagcgaagagccagaagttgttcaaagacttcctccagcatcctctgttagcacactagttttagcaccaagacctaaaccaagacaacgtttaacacctgtagataagaaggtatctttcgtggatatcatgccacatcagagtgatgtttcacaagaaggcagtgtagatgaggtaaaagagaatactgagaaaatgcagcaaggaaaagatgatgtgtctttactatctgaaggtcagcttgcagaacaaagcttggcatcttctgaagatgaaacagaaataacagaggacttggaaccagaagttgaagaggacatgtcagcttctgacagtgatgactgtattattccaggtcctatctccaagaatatcaaacagccatcagaaaaaattcggattgagatcatagctctaagccttaatgattctcaagtaaccatggatgacactatccaacggctgtttgttgagtgtcgattctacagtcttcctgctgaagagacacccgtgtcacttccaaaacccaagagtgggcagtgggtctactataactatagcaatgtgatctacgtggataaagaaaacaacaaagcaaagagagacatcttaaaagctatactacaaaaacaagagatgcctaatagaagccttcgcttcaccgtggtcagtgaccctccagaggacgagcaggacctggagtgtgaggacattggcgtggctcacgtcgaccttgccgacatgtttcaggaagggagggacctcattgagcaaaatatcgatgtttttgatgcacgagcagatggtgaaggtattggcaagctcagggtaacagtcgaagctctccatgccctccagtctgtctacaagcaatacagagatgacttggaggcttgaaagcaaatgctccagaggcatctcctactcctcagtaaatgctcacatgaaagttcctacatgagatttttgtaattactctggtgtatataatctataattcatgggaagctgggagcggggagacctgggtttgaagtgttgaagttttgtatactttttcatttgtttatttctctattccctccttctcataactgccacccctcaggacttaagttctccataatgggcagtaccttctcaataatttatacctacgtgatagcgtgagaaagtctatttgcattttcaacattttcttaggaagaaccgaaatgcaattcccatttttatttttaataagcaaaagcataaatcttagaaaacctatgaaaaagaaatacttttatgttatccctaatcgtcccactaaatggaatgcctatgattagcttcattaagagttttatactgtgaagattttattagaagcaatatatgaaaattacttggattaatgtgttaatcttcctctttaaaatgctaatatccattttatgcacattaaagctcagtatgcattttctttgatgcatgcagtttctatcaattaaatataaagaatgaaacttagcaccaacttattcaatgactgcaagttttttgtctttctttcttaaaagttcattctatttgtattattttcatacatttgtaatggtgacccagggatgtatatataaaaaggagatagttatatagatagatgtgaaatttacacgttgaaaacttagtatatgacacagaaagaaattatgaaaagtataactcaaattctgatatgcttagttagacgtgaaaggagtatctttttatcattttttaaatttacatcaagccagtacagtgccagggtgtatctgggtaaccagatcctcgaaaagcagctctgaaagttaattttctagcttttacccaatctcactgaaggatttaattgatatttttaatggagctgtgaatcaatgctgcaaaggaattgtctctagaggtctaggatataatgcatttcattttttaatttacttttttatttgtcattttcttcaaaggatttttataggctgtgggttttcactgtttgcaaacaggctatgttccttcttaagcatatgtaaagtattcagggagataagtaatttattaaaatctacctaatttgccgtgatatattaaatctctgcttcagtgatcacagaccatttcatttagagaattaggcattccctctttgtgtgattaaagctctggaaaatgagttctttgctcctatttgtgaacattcaaagcctgctaatggcaagaagatggaatagattatgagacaattcattacagttcaatag

SEQ ID NO: 518 - protein, 1055 aa, Homo sapiens
QDADVAETPHPMFTKYGNSLLEEARGEIRNLENVIQSQRGQIEELEHLAEILKTQLRRKENEIELSLLQLREQQATDQRSNIRDNVEMIKLHKQLVEKSNALSAMEGKFIQLQEKQRTLKISHDALMANGDELNMQLKEQRLKCCSLEKQLHSMKFSERRIEELQDRINDLEKERELLKENYDKLYDSAFSAAHEEQWKLKEQQLKVQIAQLETALKSDLTDKTEILDRLKTERDQNEKLVQENRELQLQYLEQKQQLDELKKRIKLYNQENDINADELSEALLLIKAQKEQKNGDLSFLVKVDSEINKDLERSMRELQATHAETVQELEKTRNMLIMQHKINKDYQMEVEAVTRKMENLQQDYELKVEQYVHLLDIRAARIHKLEAQLKDIAYGTKQYKFKPEIMPDDSVDEFDETIHLERGENLFEIHINKVTFSSEVLQASGDKEPVTFCTYAFYDFELQTTPVVRGLHPEYNFTSQYLVHVNDLFLQYIQKNTITLEVHQAYSTEYETIAACQLKFHEILEKSGRIFCTASLIGTKGDIPNFGTVEYWFRLRVPMDQAIRLYRERAKALGYITSNFKGPEHMQSLSQQAPKTAQLSSTDSTDGNLNELHITIRCCNHLQSRASHLQPHPYVVYKFFDFADHDTAIIPSSNDPQFDDHMYFPVPMNMDLDRYLKSESLSFYVFDDSDTQENIYIGKVNVPLISLAHDRCISGIFELTDHQKHPAGTIHVILKWKFAYLPPSGSITTEDLGNFIRSEEPEVVQRLPPASSVSTLVLAPRPKPRQRLTPVDKKVSFVDIMPHQSDVSQEGSVDEVKENTEKMQQGKDDVSLLSEGQLAEQSLASSEDETEITEDLEPEVEEDMSASDSDDCIIPGPISKNIKQPSEKIRIEIIALSLNDSQVTMDDTIQRLFVECRFYSLPAEETPVSLPKPKSGQWVYYNYSNVIYVDKENNKAKRDILKAILQKQEMPNRSLRFTVVSDPPEDEQDLECEDIGVAHVDLADMFQEGRDLIEQNIDVFDARADGEGIGKLRVTVEALHALQSVYKQYRDDLEA

SEQ ID NO: 519 - DNA, 2807 bp, Homo sapiens
gtgcgactagcggcggccggcgaagcccgcgccagccccgcgggtcgctgcggcatcctcccgccgcccagcccccgcacgctccctgcagtttaaaaggacctcccgccgcttctcggcgctgccccgggattccccagccccgcgcggctccctactccacttcgcagcaacttcggcgaccgcgcgccgcccgccctcgcccgcctttgaagtttgctgtgccgaccgcaaagttgggacacttcagcggattgaatttttctcttttatctgcctccgtccccgccctccaggcttctcgttcctggatattggtgcttagcatcttggcagggtccggggacgtggactatttcgcacaccacaccacggggagggatttttttctattttccctacgaaaaacagatctttttaaggatggtgctgctccactggtgcctgctgtggctcctgtttccactcagctcaaggacccagaagttacccacccgggatgaggaactttttcagatgcagatccgggacaaggcattttttcatgattcgtcagtaattccagatggagctgaaattagcagttatctctttagagatacacctaaaaggtatttctttgtggttgaagaagacaatactccattatcagtcacagtgacgccctgtgatgcgcctttggagtggaagctgagcctccaggagctgccagaggacaggagcggggaaggctcaggtgatctggaacctcttgagcagcagaagcagcagatcattaatgaggaaggcactgagttattctcctacaaaggcaatgatgttgagtattttatatcgtctagttccccatccggtttatatcagttggatcttctttcaacagagaaagacacacatttcaaagtatatgccaccacaactccagaatctgatcagccataccctgagttaccctatgacccaagagtagatgtgacctcactggggcgcaccacggtcactttggcctggaaaccaagccccactgcctctttgctgaaacaacccattcagtactgtgtggtcatcaacaaagagcacaatttcaaaagtctctgtgcagtggaagcaaaactgagtgcagatgatgcttttatgatggcaccgaaacctggtctggacttcagcccctttgactttgcccactttggatttccttctgataattcaggtaaagaacgcagtttccaggcaaagccttctccaaaactggggcgtcatgtctactccaggcccaaggttgatattcagaaaatctgcataggaaacaagaacatcttcaccgtctctgatctgaaacccgacacgcagtactactttgacgtatttgtggtcaacatcaacagcaacatgagcaccgcttatgtaggtacctttgccaggaccaaggaagaagccaaacagaagacagtcgagctcaaagatgggaagataacagatgtatttgttaaaaggaagggagcaaagtttctacggtttgctccagtctcttctcaccaaaaagtcaccttctttattcactcttgtctggatgctgtccaaatccaagtgagaagagatgggaaacttcttctgtctcagaatgtggaaggcattcagcagtttcagcttagaggaaaacctaaagctaaatacctcgttcgactgaaaggaaacaagaaaggagcatctatgttgaaaattctagctaccacaaggcctactaagcagtcatttccctctcttcctgaagacacaagaatcaaagcctttgacaagctccgtacctgttcctcggccaccgtggcttggctaggcactcaggaaaggaacaagttttgcatctacaaaaaagaagtggatgataactacaatgaagaccagaagaaaagagagcaaaaccaatgtctaggaccagatataaggaagaagtcagaaaaggtcctctgtaaatatttccacagtcaaaacctgcagaaagcagtgaccacagaaacaattaaaggtcttcagcctggcaaatcttacctgctggatgtttatgtcataggacatggggggcactctgtaaagtatcagagtaaggttgtgaaaactagaaagttctgttagttaccttcttatagagatatattatgtagaactccaggagggacattaaatcactttaagtataaactgactactcccacagttgagagaagttgtgacctgtacttgtactatggaaggaaggatatcaacgtgtgtatattgatgtttatataagtaactcttgaaggagacttgttctagcgtgccccatggtacctagtgtgtgtctgatgccggttggtgtcaaagatagagggcttcttgaaggaacttgccattccttgctttgaccactgcatgaactgcttctaaattattttattacctaaaaatttaaaatatgccattcattgcacacacccacaaatgcaaatcattcctctctatagatgctaggatatatataaattattttataaattcttgttttaaatgtcagtgtttctatgattgtaaactattaaattcttttcctattaaagtacagatctaatctaagtattattaagttgatagccctctagtcagttatattgctattgtaaattcttgtttgttgagtaaaatgtttaaatactatatgtatctcatgtacaaagttgacatacattatattcatgtacataaaattaaagagattagattatatactgttaaaaaaaaaaaaaaaaaaaaaaaaaaaaaaaaaaaaaaaa

SEQ ID NO: 520 - protein, 331 aa, Homo sapiens
MMAPKPGLDFSPFDFAHFGFPSDNSGKERSFQAKPSPKLGRHVYSRPKVDIQKICIGNKNIFTVSDLKPDTQYYFDVFVVNINSNMSTAYVGTFARTKEEAKQKTVELKDGKITDVFVKRKGAKFLRFAPVSSHQKVTFFIHSCLDAVQIQVRRDGKLLLSQNVEGIQQFQLRGKPKAKYLVRLKGNKKGASMLKILATTRPTKQSFPSLPEDTRIKAFDKLRTCSSATVAWLGTQERNKFCIYKKEVDDNYNEDQKKREQNQCLGPDIRKKSEKVLCKYFHSQNLQKAVTTETIKGLQPGKSYLLDVYVIGHGGHSVKYQSKVVKTRKFC

SEQ ID NO: 521 - DNA, 4423 bp, Homo sapiens
ggcagccgcgcagagcgcgcacccaagcggccggacctccccgactcccgggccgcccccgtctcgcgccctgcctccctccttcggccttcacctacccgcctccggattggccgctaggaatcccgcccctctaaagccctgcctgctattggtcacgattttataatcaatggataaagtgggaaaaatgtggaataacttcaaatacaggtgtcagaatctcttcggtcatgagggaggaagccgtagtgaaaatgtggacatgaactccaacagatgtttgtctgtcaaagagaaaaacatcagcataggagactcaactcctcagcaacaaagcagtcccttaagagaaaatattgccttacaactgggattaagcccttcgaagaattcttcaaggagaaatcaaaattgtgccacagaaatccctcaaattgttgaaataagcatcgaaaaggataatgattcttgtgttaccccaggaacaagacttgcacgaagagattcctactctcgacatgctccatggggtgggaagaaaaaacattcctgttctacaaagacccagagttcattggatgctgataaaaagtttggtagaactcgaagtggacttcaaaggagagagaggcgctacggcgtaagttctgtacacgacatggacagtgtttccagcagaactgtaggaagtcgctctctaagacagaggttgcaggatactgtgggcttgtgttttcccatgagaacttacagcaagcagtcaaagcctctcttttccaataaaagaaaaatccatctctctgaattaatgcttgagaaatgcccttttcctgctggctcagatttagcccaaaaatggcatttgattaaacagcatacagctcctgtgagcccacattcaacattttttgatacatttgatccatctttggtttctacagaagatgaagaagataggcttagagagagaaggcggcttagtattgaagaaggggttgatccccctcccaatgcacaaatacatacatttgaagctactgcacaggttaatccattatataaactgggaccaaaattagctcctggaatgactgaaataagtggggacagttctgcaattccacaagctaattgtgactcggaagaggatacaaccaccctgtgtttgcagtcacggaggcagaagcagcgtcagatatctggagacagccatacccatgttagcagacagggagcttggaaagtccacacacagattgattacatacactgcctcgtgcctgatttgcttcaaattacagggaatccctgttactggggagtgatggaccgttatgaagcagaagcccttctcgaagggaaacctgaaggcacgtttttgctcagggactctgcgcaagaggactacctcttctctgtgagcttccgccgctacaacagatccctgcatgcccgaattgagcagtggaatcacaactttagtttcgacgcccatgacccgtgtgtatttcactcctccactgtaacgggacttttagaacattataaagatcccagttcgtgcatgttttttgaaccattgcttactatatcactaaataggactttcccttttagcctgcagtatatctgtcgcgcggtaatctgcaggtgcactacgtatgatggaattgatgggctccctctaccctcaatgttacaggattttttaaaagagtatcattataaacaaaaagttagagttcgctggttggaacgagaaccagtcaaggcaaagtaaactctccggtccccaaaggttgttaactaggtccgctttcatgtgcatcagacagtacacctatagcaagcacacgtagcagtgttaggctttttcatacagtatgtaagcttagtgttagtatctgtcagatgctacctgctgttacttattcagataaacatggtgcctattggaacaatagcggatagagctacaggtgttcagtaagactacaaaaacattttgcctatttcgctaacagtttggtttttaatggctgtggtatttgagtgaggcaactctggggcatttgttatgaagaattctatttcttactgaagaacaaattattaatattggatgagtatttcaacagtgtgactaatgtttgaaattattttttctaagagtttttctataaccttccaaaagtcgtgatgtttgtagttactataaatcaagctttggaagtccaaaaagaataaaagactgccttccttttagaaaaaaatgcaattttctggccacaagggcatagtgcagttcacttacgtgttgatgtagtttataatcagacgccttttctcttctgcaaaaggtactgttaagtaaaccagattttctaaataggcattcttaaaatttcagacttacaaagctagtagtagaattttattgaaaggcctaggtattaattttttaaatgagtgctttaacttaaaacaggcgtttggaatagctgctgcaatgtagtcttgtgtgtgatttttttttaagttgatgtgcagtctaattgttgtttcataaaagttggatctgttcctatgcccaggatgattttgtgaaccgtgaagtacgtgagactagaagacgcccaaacaagtcagataatagtaactacaatggttgctgatgttgagattattgttgaactataattaataatttggatggcagaatttatctcttttttgtaaactctcataactgaattgcttaagtataatttatagaatttcagtgcagttcattcttaatggaaaatctgaaacctaaattgcagatttaaaaggtactgtacaaccattatatctgtaaataacttagcacctttttgtcacttagaataatatgtactactacttgagtgagcgcttttggaagttatatcaagttctagtgtttgcttcttagtaactgaactgaatttacagttctgtcctagacattttgcactaaagtagccgaatccactctcatgtcttttcgttaatgtgctctgtaccactggtgagtgctccatagtttccttacctgctgctacagaatgttattttacatccctatggctattgccaaggctacaaaaaaggaaagctatatttgtatgcaacactaaccttttgactgctaatgtatgtttctgcttgctgtgccttgttatggctgctttttttgtgctaataaagtatgtttggtgttctccttgtatatctgctgttttatacatttgcaacaatttctcttgtaaatggaatggtttggggtttttaaataagcattaactaacaacctttctatagttaatgcagagttaatgaacagtctaatattgacttatcagaataagctaactctaaatttaatgctctacatcttatcagtcataattatatatactgtggaacagtatctgtagttactgcaaattactgtacagtttaggttataacagaaaactgacagagaagtaataaacctattgatttctctgcttataaatgaaagattgaaactatccaatgacatattatagtaaatgagtatctgtaacctcccactgcatcagaagcaggttaaatgaagtcttgtgaatttgtaatagatcagtaccatttattggtttggggaccatcttaattaaaaataaatgcccaaaatgtagaactttaaccaaagacttgtcccttttaaagcaaaatggggattgaagggacttataatttctgttgtttctaattaaagtccctgaagatcatataccaaagtgtttgagaacttcatccaaacctactttaaagcattatgtgcaattaagttgttatgacataattatattgcctaattgttgggtcttttttcttgagcttataatgtacctggaaaataaacctcttgagaaaaagaaaagttcatactgattattggaaaaggactatatatgtgagcaagattgtgttttagagaggaaacttgaaactccaagaaagcacttgatgtttttatatgcttgtagcaaattgatgttctaactgtagttttatagaaagtattaatgcttttatgtatttcaaaactttcatatgttaaatggaaattgttttaaatgtgtttgagtttatgtaagcatgtatacactgtgctaaaagtcacatgtttcagtttgtgtataatattaatatgcaatttttggtttaaatttttgtcttaaaatattagtggcttacattttaaaaaagaaaaatcaccagcatgaacttgcacctaagtctatattcactgtgtccttttctgaatcccattgtagcctgtcaactaaatttgagtgttaacggtctttttaaagtgcatttaaatacaaaccaggaatttctttag

SEQ ID NO: 522 - protein, 536 aa, Homo sapiens
MDKVGKMWNNFKYRCQNLFGHEGGSRSENVDMNSNRCLSVKEKNISIGDSTPQQQSSPLRENIALQLGLSPSKNSSRRNQNCATEIPQIVEISIEKDNDSCVTPGTRLARRDSYSRHAPWGGKKKHSCSTKTQSSLDADKKFGRTRSGLQRRERRYGVSSVHDMDSVSSRTVGSRSLRQRLQDTVGLCFPMRTYSKQSKPLFSNKRKIHLSELMLEKCPFPAGSDLAQKWHLIKQHTAPVSPHSTFFDTFDPSLVSTEDEEDRLRERRRLSIEEGVDPPPNAQIHTFEATAQVNPLYKLGPKLAPGMTEISGDSSAIPQANCDSEEDTTTLCLQSRRQKQRQISGDSHTHVSRQGAWKVHTQIDYIHCLVPDLLQITGNPCYWGVMDRYEAEALLEGKPEGTFLLRDSAQEDYLFSVSFRRYNRSLHARIEQWNHNFSFDAHDPCVFHSSTVTGLLEHYKDPSSCMFFEPLLTISLNRTFPFSLQYICRAVICRCTTYDGIDGLPLPSMLQDFLKEYHYKQKVRVRWLEREPVKAK

SEQ ID NO: 523 - DNA, 2838 bp, Homo sapiens
ggggaaactcatttgtggagaccagccctctggcttggtgagtgaatctggtttacaccggctcctgccctgccttcactcttctcccctgattcaagactcctctgctttggactgaagcactgcaggagtttgtgaccaagaacttcaagagtcaagacagaaggaagccaagggagcagtgcaatggatttctcagtaaaggtagacatagagaaggaggtgacctgccccatctgcctggagctcctgacagaacctctgagcctagattgtggccacagcttctgccaagcctgcatcactgcaaagatcaaggagtcagtgatcatctcaagaggggaaagcagctgtcctgtgtgtcagaccagattccagcctgggaacctccgacctaatcggcatctggccaacatagttgagagagtcaaagaggtcaagatgagcccacaggaggggcagaagagagatgtctgtgagcaccacggaaaaaaactccagatcttctgtaaggaggatggaaaagtcatttgctgggtttgtgaactgtctcaggaacaccaaggtcaccaaacattccgcataaacgaggtggtcaaggaatgtcaggaaaagctgcaggtagccctgcagaggctgataaaggagaatcaagaggctgagaagctggaagatgacatcagacaagagagaaccgcctggaagaattatatccagatcgagagacagaagattctgaaagggttcaatgaaatgagagtcatcttggacaatgaggagcagagagagctgcaaaagctggaggaaggtgaggtgaatgtgctggataacctggcagcagctacagaccagctggtccagcagaggcaggatgccagcacgctcatctcagatctccagcggaggttgaggggatcgtcagtagagatgctgcaggatgtgattgacgtcatgaaaaggagtgaaagctggacattgaagaagccaaaatctgtttccaagaaactaaagagtgtattccgagtaccagatctgagtgggatgctgcaagttcttaaagagctgacagatgtccagtactactgggtggacgtgatgctgaatccaggcagtgccacttcgaatgttgctatttctgtggatcagagacaagtgaaaactgtacgcacctgcacatttaagaattcaaatccatgtgatttttctgcttttggtgtcttcggctgccaatatttctcttcggggaaatattactgggaagtagatgtgtctggaaagattgcctggatcctgggcgtacacagtaaaataagtagtctgaataaaaggaagagctctgggtttgcttttgatccaagtgtaaattattcaaaagtttactccagatatagacctcaatatggctactgggttataggattacagaatacatgtgaatataatgcttttgaggactcctcctcttctgatcccaaggttttgactctctttatggctgtgcctccctgtcgtattggggttttcctagactatgaggcaggcattgtctcatttttcaatgtcacaaaccacggagcactcatctacaagttctctggatgtcgcttttctcgacctgcttatccgtatttcaatccttggaactgcctagtccccatgactgtgtgcccaccgagctcctgagtgttctcattcctttacccacttctgcatagtagcccttgtgctgagactcagattctgcacctgagttcatctctactgagaccatctcttcctttctttccccttcttttacttagaatgtctttgtattcatttgctagggcttccatagcaaagcatcatagattgctgatttaaactgtaattgtattgccgtactgtgggctggaaatcccaaatctagattccagcagagttggttctttctgaggtctgcaaggaagggctctgttccatgcctctctccttggcttgtagaaggcatcttgtccctatgactcttcacattgtctttatgtacatctctgtgcccaagttttcccttttttattaagacaccagtcatactggctcagggcccaccgctaatgccttaatgaaatcattttaacattatattctctacaaagaccttatttccaaataagataatatttggaggtattgggaataaaaactccaacatataaatttgaggaaggcacgatttcactcataacaatcttaccctttcttgcaagagatgcttgtacataattttcctaataccttggtttcactagtagtaaacattattattttttttatatttgcaaaggaaacatatctaatccttcctatagaaagaacagtattgctgtaattccttttcttttcttcctcatttcctctgccccttaaaagattgaagaaagagaaacttgtcaactcatatccacgttatctagcaaagtacataagaatctatcactaagtaatgtatccttcagaatgtgttggtttaccagtgacaccccatattcatcacaaaattaaagcaagaagtccatagtaatttatttgctaatagtggatttttaatgctcagagtttctgaggtcaaattttatcttttcacttacaagctctatgatcttaaataatttacttaatgtattttggtgtattttcctcaaattaatattggtgttcaagactatatctaattcctctgatcactttgagaaacaaacttttattaaatgtaaggcacttttctatgaattttaaatataaaaataaatattgttctgattattactgaaaaaaaaaaaaaaaaaaaaaaaaaaaaaa

SEQ ID NO: 524 - protein, 442 aa, Homo sapiens
MDFSVKVDIEKEVTCPICLELLTEPLSLDCGHSFCQACITAKIKESVIISRGESSCPVCQTRFQPGNLRPNRHLANIVERVKEVKMSPQEGQKRDVCEHHGKKLQIFCKEDGKVICWVCELSQEHQGHQTFRINEVVKECQEKLQVALQRLIKEDQEAEKLEDDIRQERTAWKIERQKILKGFNEMRVILDNEEQRELQKLEEGEVNVLDNLAAATDQLVQQRQDASTLISDLQRRLTGSSVEMLQDVIDVMKRSESWTLKKPKSVSKKLKSVFRVPDLSGMLQVLKELTDVQYYWVDVMLNPGSATSNVAISVDQRQVKTVRTCTFKNSNPCDFSAFGVFGCQYFSSGKYYWEVDVSGKIAWILGVHSKISSLNKRKSSGFAFDPSVNYSKVYSRYRPQYGYWVIGLQNTCEYNAFEDSSSSDPKVLTLFMAVLPVVLGFS

SEQ ID NO: 525 - DNA, 4521 bp, Homo sapiens
cgggaagctgctggcagccctgctaacttctcctggttccgaaatggggtgctgtgggcccagggtcccctggagaccgtgacactgctgcccgtggccagaactgatgctgccctttacgcctgccgcatcctgactgaggctggtgcccagctctccactcccgtgctcctgagtgtactctatcccccggaccgtccaaagctgtcagccctcctagacatgggccagggccacatggctctgttcatctgcactgtggacagccgccccctggccttgctggccttgttccatggggagcacctcctggccaccagcctgggtccccaggtcccatcccatggtcggttccaggctaaggctgaggccaactccctgaagttagaggtccgagaactgggccttggggactctggcagctaccgctgtgaggccacaaatgttcttggatcatccaacacctcactcttcttccaggtccgaggagcctgggtccaggtgtcaccatcacctgagctccaagagggccaggctgtggtcctgagctgccaggtacacacaggagtcccagaggggacctcatatcgttggtatcgggatggccagcccctccaggagtcgacctcggccacgctccgctttgcagccataactttgacacaagctggggcctatcattgccaagcccaggccccaggctcagccaccacgagcctagctgcacccatcagcctccacgtgtcctatgccccacgccacgtcacactcactaccctgatggacacaggccctggacgactgggcctcctcctgtgccgtgtggacagtgaccctccggcccagctgcggctgctccacggggatcgccttgtggcctccaccctacaaggtgtggggggacccgaaggcagctctcccaggctgcatgtggctgtggcccccaacacactgcgtctggagatccacggggctatgctggaggatgagggtgtctatatctgtgaggcctccaacaccctgggccaggcctcggcctcagctgacttcgacgctcaagctgtgaatgtgcaggtgtggcccggggctaccgtgcgggaggggcagctggtgaacctgacctgccttgtgtggaccactcacccggcccagctcacctacacatggtaccaggatgggcagcagcgcctggatgcccactccatccccctgcccaacgtcacagtcagggatgccacctcctaccgctgcggtgtgggcccccctggtcgggcaccccgcctctccagacctatcaccttggacgtcctctacgcgccccgcaacctgcgcctgacctacctcctggagagccatggcgggcagctggccctggtactgtgcactgtggacagccgcccgcccgcccagctggccctcagccacgccggtcgcctcttggcctcctcgacagcagcctctgtccccaacaccctgcgcctggagctgcgagggccacagcccagggatgagggtttctacagctgctctgcccgcagccctctgggccaggccaacacgtccctggagctgcggctggagggtgtgcgggtgatcctggctccggaggctgccgtgcctgaaggtgcccccatcacagtgacctgtgcggaccctgctgcccacgcacccacactctatacttggtaccacaacggtcgttggctgcaggagggtccagctgcctcactctcattcctggtggccacgcgggctcatgcaggcgcctactcttgccaggcccaggatgcccagggcacccgcagctcccgtcctgctgccctgcaagtcctctatgcccctcaggacgctgtcctgtcctccttccgggactccagggccagatccatggctgtgatacagtgcactgtggacagtgagccacctgctgagctggccctatctcatgatggcaaggtgctggccacgagcagcggggtccacagcttggcatcagggacaggccatgtccaggtggcccgaaacgccctacggctgcaggtgcaagatgtgcctgcaggtgatgacacctatgtttgcacagcccaaaacttgctgggctcaatcagcaccatcgggcggttgcaggtagaaggtgcacgcgtggtggcagagcctggcctggacgtgcctgagggcgctgccctgaacctcagctgccgcctcctgggtggccctgggcctgtgggcaactccacctttgcatggttctggaatgaccggcggctgcacgcggagcctgtgcccactctcgccttcacccacgtggctcgtgctcaagctgggatgtaccactgcctggctgagctccccactggggctgctgcctctgctccagtcatgctccgtgtgctctaccctcccaagacgcccaccatgatggtcttcgtggagcctgagggtggcctccggggcatcctggattgccgagtggacagcgagccgctcgccagcctgactctccaccttggcagtcgactggtggcctccagtcagccccagggtgctcctgcagagccacacatccatgtcctggcttcccccaatgccctgagggtggacatcgaggcgctgaggcccagcgaccaaggggaatacatctgttctgcctcaaatgtcctgggctctgcctctacctccacctactttggggtcagagccctgcaccgcctgcatcagttccagcagctgctctgggtcctgggactgctggtgggcctcctgctcctgctgttgggcctgggggcctgctacacctggagaaggaggcgtgtttgtaagcagagcatgggcgagaattcggtggagatggcttttcagaaagagaccacgcagctcattgatcctgatgcagccacatgtgagacctcaacctgtgccccacccctgggctgaccagtggtgttgcctgccctccggaggagaaagtggccagaatctgtgatgactccagcctatgaatgtgaatgaggcagtgttgagtcctgcccgcctctacgaaaacagctctgtgacatctgactttttatgacctggccccaagcctcttgcccccccaaaaatgggtggtgagaggtctgcccaggagggtgttgaccctggaggacactgaagagcactgagctgatctcgctctctcttctctggatctcctcccttctctccatttctccctcaaaggaagccctgccctttcacatccttctcctcgaaagtcaccctggactttggttggattgcagcatcctgcatcctcagaggctcaccaaggcattctgtattcaacagagtatcagtcagcctgctctaacaagagaccaaatacagtgacttcaacatgatagaattttatttttctctcccacgctagtctggctgttacgatggtttatgatgttggggctcaggatccttctatcttccttttctctatccctaaaatgatgcctttgattgtgaggctcaccatggccccgctttgtccacatgccctccagccagaagaaggaagagtggaggtagaagcacacccatgcccatggtggacgcaactcagaagctgcacaggacttttccactcacttcccattggctggagtattgtcacatggctactgcaagctacaagggagactgggaaatgtagtttttattttgagtccagaggacatttggaattggacttccaaaggactcccaactgtgagctcatccctgagacttttgacattgttgggaatgccaccagcaggccatgttttgtctcagtgcccatctactgagggccagggtgtgcccctggccattctggttgtgggcttcctggaagaggtgatcactctcacactaagactgaggaaataaaaaaggtttggtgttttcctagggagagagcatgccaggcagtggagttgcctaagcagacatccttgtgccagatttggcccctgaaagaagagatgccctcattcccaccaccaccccccctacccccagggactgggtactaccttactggcccttacaagagtggagggcagacacagatgttgtcagcatccttattcctgctccagatgcatctctgttcatgactgtgtgagctcctgtccttttcctggagaccctgtgtcgggctgttaaagagaatgagttaccaagaaggaatgacgtgcccctgcgaatcagggaccaacaggagagagctcttgagtgggctagtgactccccctgcagcctggtggagatggtgtgaggagcgaagagccctctgctctaggatttgggttgaaaaacagagagagaagtggggagttgccacaggagctaacacgctgggaggcagttgggggcgggtgaactttgtgtagccgaggccgcaccctccctcattccaggctcattcattttcatgctccattgccagactcttgctgggagcccgtccagaatgtcctcccaataaaactccatcctatgacg

SEQ ID NO: 526 - protein, 977 aa, Homo sapiens
REAAGSPANFSWFRNGVLWAQGPLETVTLLPVARTDAALYACRILTEAGAQLSTPVLLSVLYPPDRPKLSALLDMGQGHMALFICTVDSRPLALLALFHGEHLLATSLGPQVPSHGRFQAKAEANSLKLEVRELGLGDSGSYRCEATNVLGSSNTSLFFQVRGAWVQVSPSPELQEGQAVVLSCQVHTGVPEGTSYRWYRDGQPLQESTSATLRFAAITLTQAGAYHCQAQAPGSATTSLAAPISLHVSYAPRHVTLTTLMDTGPGRLGLLLCRVDSDPPAQLRLLHGDRLVASTLQGVGGPEGSSPRLHVAVAPNTLRLEIHGAMLEDEGVYICEASNTLGQASASADFDAQAVNVQVWPGATVREGQLVNLTCLVWTTHPAQLTYTWYQDGQQRLDAHSIPLPNVTVRDATSYRCGVGPPGRAPRLSRPITLDVLYAPRNLRLTYLLESHGGQLALVLCTVDSRPPAQLALSHAGRLLASSTAASVPNTLRLELRGPQPRDEGFYSCSARSPLGQANTSLELRLEGVRVILAPEAAVPEGAPITVTCADPAAHAPTLYTWYHNGRWLQEGPAASLSFLVATRAHAGAYSCQAQDAQGTRSSRPAALQVLYAPQDAVLSSFRDSRARSMAVIQCTVDSEPPAELALSHDGKVLATSSGVHSLASGTGHVQVARNALRLQVQDVPAGDDTYVCTAQNLLGSISTIGRLQVEGARVVAEPGLDVPEGAALNLSCRLLGGPGPVGNSTFAWFWNDRRLHAEPVPTLAFTHVARAQAGMYHCLAELPTGAAASAPVMLRVLYPPKTPTMMVFVEPEGGLRGILDCRVDSEPLASLTLHLGSRLVASSQPQGAPAEPHIHVLASPNALRVDIEALRPSDQGEYICSASNVLGSASTSTYFGVRALHRLHQFQQLLWVLGLLVGLLLLLLGLGACYTWRRRRVCKQSMGENSVEMAFQKETTQLIDPDAATCETSTCAPPLG

SEQ ID NO: 527 - DNA, 1448 bp, Homo sapiens
tcgacccacgcgtccggggaaggaaaacctccaaacacaagaggaatttggctatcactggaggagtgactttgtcggtcattgcatccccagttattgctgcagttagtgttggtattggtgtccccattatgctggcatatgtttatggggttgtgcccatttctctttgtcgtggaggtggctgtggagttagcacagccaacggaaaaggagtgaaaattgaatttgatgaagatgatggtccaatcacagtggcagatgcctggagagccctcaagaatcccagcattggggaaagcagcattgaaggcctgactagtgtattgagcactagtggaagccctacagatggacttagtgttatgcaaggtccttacagcgaaacggccagctttgcagccctctcagggggcacgctgagtggcggcattctctccagtggcaagggaaaatatagcaggttagaagttcaagccgatgtccaaaaggaaattttccccaaagacacagccagtcttggtgcaattagtgacaacgcaagcactcgtgctatggccggttccataatcagttcctacaacccacaggacagagaatgcaacaatatggaaatccaagtggacattgaagccaaaccaagccactatcagctggtgagtggaagcagcacggaggactcgctccatgttcatgctcagatggcagagaatgaagaagaaggtagtggtggcggaggcagtgaagaggatcccccctgcagacaccaaagctgtgaacagaaagactgcctggccagcaaaccttgggacatcagcctggcccagcctgaaagcatccgcagtgacctagagagttctgatgcacagtcagacgatgtgccagacatcacctcagatgagtgtggctccccccgctcccatactgcagcctgcccctcgacccccagagcccaaggtgcaccgagcccaagtgcccatatgaacctctctgccctagccgagggacaaactgtcttgaagccagaaggtggagaagccagagtatgaagtggaatgaatgctcctgttctgagaagcacacttgtaactgcatcttttggaatttttttttttttttttccaaggggtagagatttatgtattttatttcacagattctctggtcacaggtttttgcccagggaaattctgagaaattcacaatttcttaccagataaaacatgaaaagtttgccgttagttcccctcccctcccctccctctttttagttttaatttattagttaaactgatggcagcaatccatgaggtgtgtcaaagagtgtacatatgtatgtgtgtatattgaatgctaaacatattactgaaagacacattttaataaagatttctgtcataaaaaaaaaaaaaaaaaaaaaaaaaaaaaaaaaaaaaaaaaaaaaaaaa

SEQ ID NO: 528 - protein, 348 aa, Homo sapiens
DPRVRGRKTSKHKRNLAITGGVTLSVIASPVIAAVSVGIGVPIMLAYVYGVVPISLCRGGGCGVSTANGKGVKIEFDEDDGPITVADAWRALKNPSIGESSIEGLTSVLSTSGSPTDGLSVMQGPYSETASFAALSGGTLSGGILSSGKGKYSRLEVQADVQKEIFPKDTASLGAISDNASTRAMAGSIISSYNPQDRECNNMEIQVDIEAKPSHYQLVSGSSTEDSLHVHAQMAENEEEGSGGGGSEEDPPCRHQSCEQKDCLASKPWDISLAQPESIRSDLESSDAQSDDVPDITSDECGSPRSHTAACPSTPRAQGAPSPSAHMNLSALAEGQTVLKPEGGEARV

SEQ ID NO: 529 - DNA, 3190 bp, Homo sapiens
attatacccattgttagctgactggattaaagcacatgatagtttaccttttaacagcataatgcaatattagaaatagttgaagaaattggaaggagtttcagaaatgtagctgagtttctcctgggcttaagggactttatagctcatgttcaaatgcaccactgtctctctgaattacagatgatctgtttttctaacaatacgacctgacgattttttttttttttaagagacagggtctcgctctgttgcccagactggagtgtagtggcgcggtcttggctcactgcagcctcggcctcctgggctcaagggatcctcttgcctcaccctcccgggtagctgggactgcaggtgtgtgctaccatacttggctgattttttaattttttgtagagatggagtctcgctgtattgcccaggctggtctcgggctcctggcctggggtgatcctcctgccctggcctcccagcaaattttttaaaataaattggctgggcacggtggctcccacctgtaatcccagcactttgggaggccgaggtgggcggatcgcctggggtcaggaattcgagaccagcctgaccaacatggagaaaccccatctctactaaaaatacaaaattagccgggtgtggtggtgcatgcctgtggtcccagctattcgggaggctgaggcgggagaatcgcttgggcctgggaggtggaggttgtggtgagcagggattgctccattgcactccagcctgggcaacaagagcgaaactctgtcaaaaaaaaaaaaaaaaattctcctggataataaggctctttgaaaggaggattactcattgttttacgtaggaatatatgatgagtattatttagcaagactgttgctaaagaatatctgatgagctgaaaacattcttagtaaattgaataaatgtttaagggaaaaaatacgtagtatttatatttcattgtttcaacttgagaccatttcagatcacttcggaagtaatttaattcatcggagtatttgtaatatatgtttctaaaaaagtttagttctaaagatcagagaaaaagcatgacacaaagcgttttgactattttatgaatatgtgaattgaaagagaatgtacataatcatgtagtttccgttggcattggccggtttgtaatttcacaagagtcagatgaggtcatctacctgcagtatgtgaaggtgaatgtaaagtcatgtgactggacatgatgaagatgaagagggactctcgtttctttctgtttaagccaacacagctcagagtccttataagaaactgaaagaagcattatcgtcagtggaagcttttgaaaaacactacttagtaagtattaacaagtgttcaatgtctgttctgtgaatacctgtctctagaaggctttgctacatggcctgttgagttgggaaggaactggtgtggggggccccttcttgttggttttttttagtttctttggtacctggggagttgtggacaaaacatggagtagttcatcaaatgtgtattagtgcccatggtaccatgctaggcatggaatcatctttgaatatttaccgttttgttcaaattgggtttgctcacacagaaattataagagaggctagtgaatacttttctttgtaaaaaggagtaatttggacttgggcagagctattgtatttgattttgaaagacttaaattagcaaaactttaaaaaacggtgtaggcagaagtgtggtgggtcagcgtcattcccgggtcatgggcaacttgagcgtttggtctgcccgtaatggctgtacctcttatacacacaagtatgaaaaatacccagcatgtcacccacgtgcagaaagtccttggaaaagttagatgttttggatgagtttgtgggtttcttttattattatgcttcataatttatacacaggttaccaattttgcttatatattacagaaaaattcacaaaaatagatgcaaaggaaaaaataatgttacattattagcaatgtcttctgcgggctgggcatggtggctcacgcctgtaattcagcactttgggaggctgaggcaggtggatcacttgaggtcaggagtttgagaccagcctagccaacatggtgaaatcctgtctctgctaaagatacaaaaaattagccgggcctggtggcgcctgtagtcccagctacttgggaagctgaggcacaagaatcacttcaacctatgaggcggaggttgcagtgagctgagatctcaccgctgtgctccagcctgggcgatggagcaagactctgtctcaaaacaaaaacccaacaatgtcttttgtgtgagctttaggtgaataaatgtagtatttgtccatcattaaaagttcaagtacataattgtgtttttacttccccacaggatttgtcccatgccaccattgaaatgtatacaagcattgggaggattcgatctgctaagtttgttggaaaagatctggcagagttttacatgtaattgattttgtacttttctttgaattctaaacatacaaataacacgagaagatttgttatatatggagttagtataaagtgcacataaatttgtagactgaaaagtgtagattctcttacccagtcctcataatttttttttcagtttcttctgaaaaccagatggagagattttctgcttgttactcttaataactgttattggtctttgaggttcttttatttaattaaatatatacatttttgtaactaagtttaattaaagaattataagacagtataatggtgagtaaattggcatatagattcttacatattttgttatatagcatttctctaattttatcaagtattaagaggactgaaaaacctcaaggccattgatgtaaagctactgcatgtgtcaggttcatgaaagagggatgatctagggatgactggaagaaggtgtgtacaaagactgcagggtttccattccagctccagctttgaagtttgattccagaaaaactcaaaatttagcgtatttctggtgtgtttcataaaatcagactatcaaagagaagaaaccccagtgggtcatgtggttaccatttcagagtactcaaaggagatacaagctataaggaaaaagatgcttgttttcattttctaaaaaaaaaaaaaaaaagg

SEQ ID NO: 530 - DNA, 1972 bp, Homo sapiens
aatagcaggagtggcctgtgcctcaacaacatgcttttgctgcagataatcagccagagcctgtttctctactcctcgctaagaatgctttgtttcccgtaaggaaagcttttagctaatctataatctatagaaactatgcttatcattggctgtcagtaaatatgtgggtcagactctgtttgtggctttcagctctgaaggctgtcagctccctgatcccactctgcactctatttctgtgtctgtctttaattcttctagtgctgctgggttagggtcttcacgaccgaactggtctcggcagtggaagaacatggaaacactaggctgacttagtctcccagcctacatctttctcccatgctggacgctgcctgccctcaaacatcagactgcaagttcttcagcttttggactcttggacttacaccagtgatttgccaggagctctcaggccttcagcaacagactgaaggctgtgctgtcggcttccctacttttgaggttttgggactcagactggcttcctggctcttcagcttgcagatggcctattgtgggacttcaccttgtgatcatctcgcccgtgcttcgtgggggaatggagcccctggagtggttgtgcagaccagtgcaagcctacaacccgtgtgcggaggcgctcggtgcagcaggagcctcagaacggcggggcgccctgcccacccctggaagagagagctggctgcctggagtactccaccccgcagggccaggactgcgggcacacctatgttcctgcctttataactacctctgcattcaacaaggagagaacacgacaagctacgtctccacactggtctacacacacagaggatgctggatactgtatggagtttaagacagagtccttgactcctcactgtgctctggaaaaccggcccttgactagatggatgcagtatctccgagagggatacacggtgtgtgtggattgtcagcctccagctatgaactctgtgagccttcgttgttctggagatggcctggactccgatggaaatcagactctccattggcaagcaattggtaatcctcggtgtcaaggaacttggaaaaaagttcggcgagtagaccagtgttcttgtccagctgttcacagttttatttttatatagatggtgatataaatatttccaaatgcatttgtaaacattctaaatattctcaagtcatgttcaatgtttcctaaaccttcaattttggccaaagtccccaaacacatcattgccacactctgaagtagagaaagaaaatttaggggccagttctcaaggaacacaggtcctttatttttattttaactaagttgaagacccactcaaaaagctcttgtggttttatgttcttgacctttcaactggagtcctctcattcagcaggtggcccgtgagacacagaatacatgtctgtttgctaaagtaaaattactgtaactcagtccgattattggtgacggaagtgtcatttaaggggatctatgttttgaaccttgcagtctattttataatcttttaaaagtttctcactttaaaacatgtatacaggtatgcacactctacacatatatttccatatacttaatattccataaattctgaaataatttcaagcaaattatcacaaataatttttccacagggcaaattatttaaaattttagtaagcattctgtaatgaaaaaccaagttatactaaaaacattttttgaagaagaaattttttttttgcttaagaagtgaaaggatcaaatgctcattgtaggtcaatgggagttcttttaaatgttataattttcatgaaaagaaatgttgacaccagtgaatgaaacaattgctttcattctgaaaattctaccaccatttgcatctaagattatttccaaggcttaaagcctgaagctgaataaaataatctttcagagtcc

SEQ ID NO: 531 - protein, 142 aa, Homo sapiens
MLDAACPQTSDCKFFSFWTLGLTPVICQELSGLQQQTEGCAVGFPTFEVLGLRLASWLFSLQMAYCGTSPCDHLARASWGNGAPGVVVQTSASLQPVCGGARCSRSLRTAGRPAHPWKRELAAWSTPPRRARTAGTPMFLPL

SEQ ID NO: 532 - DNA, 2431 bp, Homo sapiens
gctgcaagagaaaaaccctcatgggtccacatggtgagaagttaagtttcctgtaagtgggcctctcaccctggaaaggagttgagggacatcagatgctggaaccctcactgaaagtccagaatgtctaagccagtgttagattttgtaaacaagtggaacagtgttaaatttctatgatgttggagccatccagagactactggaattgtcgagacttttggattattatccttatccttatcctaatcttcctagcccttcaggctagagtaggcttcgatcctgagaaccttgctgttgctctgaggagatataattctgggagaaagaatcttttataagaacagtacagattgttctcaagagggccatcagaaggaagccaaagagttcacagcctcagcaccaacaactcaacatggtcatcatgttttctatatggtttttccagctagcagtactcccttccatacctgtgactgggcagtgcttttctctctcccatgtctagcctccaaaagttaagtgaaaattagtcaactgcacgtggaagcccccaccactttggggatctctttatttcttttcagccagggacctgtccactccctttgaattaatatgggaagaaattaatacaggatgaactggagagaagggttgagtgtggcatactttctgaaacctggagctgggaattgcggagaagggaaggtctagactagttacatcacatagggattactgtaaatcaagtcatctcaagtctagtgaagacagccaacagaaacaaaacctagcatagggatagaaaataccatgcacgtgtgcagccccacctaattcctgcatccaaggcaggtgttgttaatctatcatagcacttaaaaaaaaaaaaaaaaaaagagaccaaaaataaccttaggaaccaccatattatatcactcccaatagcactgacctggtgatcaaaaacacttgagaagacatctattggccatctctggccaattacactaagaaacatatcaaggtgcttttggcacaggtgcccacaaatacggatgcagtgctgagatagtttatgagacttgtaccatttcacaaactctgaaattgggttccatattggcaaggctgccacagttgttaagaataatcctctatgtttcttcctcacaaaaccatatctcatttatatccagaccattacttcactataattacaaggacaaattattagcaagaaataagaatagtattagaagaattgatcctattttgaacccctctccagtatcttcacactcttgtcaactctccaggcctctctcttgccctgagttatcagcctgtgtggtgttaactaccttagaaggtacgagctaagaaatgtaacagtatcaaccctcccagttgcttaattatacccataggtaatacaaaaagctctgaagacccaaagatgacattactaatgatgtgatttcaggagccacagaagaaccttaccagcttccctcaaatcagtccttatcctctttctatcttcactcccatcatcatctattttcacactatccagctaagcaaagattcctggaggctgacttgtatcttcagactcacagagtgaattcagctcttctgaatcaagacccacccagtctctttcattcagacctgttgctaacaaatttatatttgccaaggatattaggcaaaagaggctacttgattggtggccaacctcgtgcccacatggaaggtatctttaatagggtcttttcaaaccttagtggaggagggtcagctcaatttgggcaatgcatttgttcccagtttcattttcttcctgggaattaactcgtcatttcattccttcagtcatcttctgtgtaggtgaccggagcactgagaggcagctctgatgcactattgtgtgtcagcagctcaaaggccctaaaacactgaaggttctgcatctgaagtattagattgttagcagcaaaatatgaaagatgaggtggacagtcctctaagccctatttagggaagcttttccaagccacaatcttaactacctacccaaaggatttgcattacccccagattctgtgccaacaaccttttaaggaaatacagtccttgggaaatgagttttgatggtgaattggggtgttaaggaagggaaagattgtcatagatggtagggctttgaaaatgcagggtatcagctgccactcctggcttcaacacattgagtcactgcctagacggttctcttggtcttattcccatcctggccaatgcttaaatactatttgttgaaaataattctttgagacagatttcagctacctcccttccaggttcgatttaacttggttgtaattgtcaatttgttgttataggtcttacctgtgtg

SEQ ID NO: 533 - DNA, 2176 bp, Homo sapiens
ccgcttccccgtcttgtacacccctaactcctgaggctcctccgaatcacgcgagtggaagcggagaagctcaagtggccgccatgtcagaggcttatttccgagtggagtcgggtgcgctggggcctgaggagaactttctttctttggacgacatcctgatgtcccacgagaagctgccggtgcgcacggagaccgccatgcctcgccttggcgctttcttcctggagcggagcgcaggcgccgagactgacaacgcggtcccacagggttccaagcttgaactacccttgtggctggcaaaaggactttttgacaacaagcgacggatcctttctgtggaactccccaagatctaccaagagggttggaggactgtgttcagtgcagatcccaatgtggtggacctccacaaaatggggccccatttctacgggtttggctcccagctcctgcattttgacagtcccgagaatgcagacatttcccagtctctgctgcagacttttatcggacgttttcgccgcatcatggactcctcacagaatgcttacaacgaagacacttcagccctggtagccaggctagacgagatggagaggggcttatttcaaacagggcagaaaggactgaatgactttcagtgttgggagaaggggcaggcttctcagatcacagcttccaacctcgttcagaattacaagaagagaaaattcactgatatggaagactgaaagccggaagaacacagaatggctcctcacagacgtatccctccgtgtgtccttgataggagctggttgaccttgtacagaaccagaatcctgtcccatttcatggcttatttcctgtggccatagagaattatagggaactggacatgctggaggatgtgggtgtccctggctctgtgagtcttccaggaccgtcccaccctgctgacccacagcccaggccctttaacccaagaacccatggccaaggagaaatcaaagtccttcctaaataagaatcactgccatataatatatcacagtagagttgcaactgagattccttgtgtctgggagtttggacagcttcagatgtacagtttcactagccacaaagcacaggtacaaactgggtcatcgcctgttcacaaaatgctctcttgatcttatttgcctcatcttcctcatggttgtacagaggatagcaccccaccatgccagcctgacttggagatatctcctgctgcctgcctgcagggagttaccccagtttccaaaaacagtcgcccagataaaggaggaaaagggaaaggcagacgaatggcatggcttttactaaagaaaagatgttggcctcatactctatactcagggcttaatgaactggaatctgcataactcagcagtcaacccagaagggaaatggttaaactgagcttgttattgcctcggagagcctaagagcacccgcacacttaattctactccctgtctagaaaagctgtcagggagtcgtttggaattgcaatgtagttattaagggctgttaaccagcctgcattacatctggaagtcaggacttgggtgctgactatgaagggccctgttttcaaaatctaacattgcaagtgtaaatgggcaagaagcctccgttgtgctttttttttcctcttcagtaacttttgcaacattattgcatagaagatccctgaccatttactaggaacctggttaagcaagcactaatctcttttcctggagatcaaggatgcaacctcaggttgagaaagaaacagggttccctgggcccattagactgtttgcagggcatcactgcttccccctgacacctcacaactagcaaaaattgtctttgtctttggaaattatagagggatttgggtatccagattgtgcagatgcaaacttaggctgtcttgatgcaaacttagaaccacagaaatgcttttaaaatgcctgttttaagatggaattgttgtttttataatttgattttagtgctaaataaatgattggctttgtacatgaatatgttctgtacaagtgctctttcactagtactacagataatcaaagctatcagaattgtgtctttgatcatatttgacggtaatacacaaataaatccatgttttagcaaaaaaaaaaaaaaaaaaaaaaaa

SEQ ID NO: 534 - protein, 216 aa, Homo sapiens
MSEAYFRVESGALGPEENFLSLDDILMSHEKLPVRTETAMPRLGAFFLERSAGAETDNAVPQGSKLELPLWLAKGLFDNKRRILSVELPKIYQEGWRTVFSADPNVVDLHKMGPHFYGFGSQLLHFDSPENADISQSLLQTFIGRFRRIMDSSQNAYNEDTSALVARLDEMERGLFQTGQKGLNDFQCWEKGQASQITASNLVQNYKKRKFTDMED

SEQ ID NO: 535 - DNA, 640 bp, Homo sapiens
attctgagccgagcccggtgccaagcgcagctagctcagcaggcggcagcggcggcctgagcttcagggcagccagctcctcccggtctcgccttcctcgcggtcagcatgaaagccttcagtcccgtgaggtccgttaggaaaaacagcctgtcggaccacagcctgggcatctcccggagcaaaacccctgtggacgacccgatgagcctgctatacaacatgaacgactgctactccaagctcaaggagctggtgcccagcatcccccagaacaagaaggtgagcaagatggaaatcctgcagcacctcatcgactacatcttggacctgcagatcgccctggactcgcatcccactattgtcagcctgcatcaccagagacccgggcagaaccagcgctccaggacgccgctgaccaccctcaacacggatatcagcatcctgtccttgcaggcttctgaattcccttctgagttaatgtcaaatgacagcaaagcactgtgtggctgaataagcggtgttcatgatttcttttattctttgcacaacaacaacaacaacaaattcacggaatcttttaagtgctgaacttatttttcaaccatttcacaaggaggacaagttgaatggacctttt

SEQ ID NO: 536 - protein, 134 aa, Homo sapiens
MKAFSPVRSVRKNSLSDHSLGISRSKTPVDDPMSLLYNMNDCYSKLKELVPSIPQNKKVSKMEILQHLIDYILDLQIALDSHPTIVSLHHQRPGQNQRSRTPLTTLNTDISILSLQASEFPSELMSNDSKALCG

SEQ ID NO: 537 - DNA, 1919 bp, Homo sapiens
caggggcgagggctacccgctctttgccgtgacaacaccgttcccccagccgggctggaggctgtgcagaaggtatcctgcagaccatgaactgagcactgttcccagaccgttcatgagcacagtgtaaggtgtgccgagacccaccacccagcgagcccctcccctccgtagcactgaggacccccggagaagatggggaggaaaaagattcagatccagcgaatcaccgacgagcggaaccgacaggtgactttcaccaagcggaagtttggcctgatgaagaaggcgtatgagctgagcgtgctatgtgactgcgagatcgcactcatcatcttcaaccactccaacaagctgttccagtacgccagcaccgacatggacaaggtgctgctcaagtacacggagtacaatgagccacacgagagccgcaccaacgccgacatcatcgagaccctgaggaagaagggcttcaatggctgcgacagccccgagcccgacggggaggactcgctggaacagagccccctgctggaggacaagtaccgacgcgccagcgaggagctcgacgggctcttccggcgctatgggtcaactgtcccggcccccaactttgccatgcctgtcacggtgcccgtgtccaatcagagctcactgcagttcagcaatcccagcggctccctggtcaccccttccctggtgacatcatccctcacggacccgcggctcctgtccccccagcagccagcactacagaggaacagtgtgtctcctggcctgccccagcggccagctagtgcgggggccatgctggggggtgacctgaacagtgctaacggagcctgccccagccctgttgggaatggctacgtcagtgctcgggcttcccctggcctcctccctgtggccaatggcaacagcctaaacaaggtcatccctgccaagtctccgcccccacctacccacagcacccagcttggagcccccagccgcaagcccgacctgcgagtcatcacttcccaggcaggaaaggggttaatgcatcacttgactgaggaccatttagatctgaacaatgcccagcgccttggggtctcccagtctactcattcgctcaccaccccagtggtttctgtggcaacgccgagtttactcagccagggcctccccttctcttccatgcccactgcctacaacacagattaccagttgaccagtgcagagctctcctccttaccagcctttagttcacctggggggctgtcgctaggcaatgtcactgcctggcaacagccacagcagccccagcagccgcagcagccacagcctccacagcagcagccaccgcagccacagcagccacagccacagcagcctcagcagccgcaacagccacctcagcaacagtcccacctggtccctgtatctctcagcaacctcatcccgggcagccccctgccccacgtgggtgctgccctcacagtcaccacccacccccacatcagcatcaagtcagaaccggtgtccccaagccgtgagcgcagccctgcgcctccccctccagctgtgttcccagctgcccgccctgagcctggcgatggtctcagcagcccagccgggggatcctatgagacgggagaccgggatgacggacggggggacttcgggcccacactgggcctgctgcgcccagccccagagcctgaggctgagggctcagctgtgaagaggatgcggcttgatacctggacattaaagtgacgattcccactcccctcctctcagcctccctgatgaagagttgacaatctcaccgcccgcccttccctgccccgggctcctcccgctcgacccccacttcctttcttgtgcttcgtgtcctgttgacggttacatttgtgtataattattatattatt

SEQ ID NO: 538 - protein, 521 aa, Homo sapiens
MGRKKIQIQRITDERNRQVTFTKRKFGLMKKAYELSVLCDCEIALIIFNHSNKLFQYASTDMDKVLLKYTEYNEPHESRTNADIIETLRKKGFNGCDSPEPDGEDSLEQSPLLEDKYRRASEELDGLFRRYGSTVPAPNFAMPVTVPVSNQSSLQFSNPSGSLVTPSLVTSSLTDPRLLSPQQPALQRNSVSPGLPQRPASAGAMLGGDLNSANGACPSPVGNGYVSARASPGLLPVANGNSLNKVIPAKSPPPPTHSTQLGAPSRKPDLRVITSQAGKGLMHHLTEDHLDLNNAQRLGVSQSTHSLTTPVVSVATPSLLSQGLPFSSMPTAYNTDYQLTSAELSSLPAFSSPGGLSLGNVTAWQQPQQPQQPQQPQPPQQQPPQPQQPQPQQPQQPQQPPQQQSHLVPVSLSNLIPGSPLPHVGAALTVTTHPHISIKSEPVSPSRERSPAPPPPAVFPAARPEPGDGLSSPAGGSYETGDRDDGRGDFGPTLGLLRPAPEPEAEGSAVKRMRLDTWTLK

SEQ ID NO: 539 - DNA, 2907 bp, Homo sapiens
gccatctgggcccaggccccatgccccgaggaggggtggtctgaagcccaccagagccccctgccagactgtctgcctcccttctgactgtggccgcttggcatggccagcaacagcagctcctgcccgacacctgggggcgggcacctcaatgggtacccggtgcctccctacgccttcttcttcccccctatgctgggtggactctccccgccaggcgctctgaccactctccagcaccagcttccagttagtggatatagcacaccatccccagccaccattgagacccagagcagcagttctgaagagatagtgcccagccctccctcgccaccccctctaccccgcatctacaagccttgctttgtctgtcaggacaagtcctcaggctaccactatggggtcagcgcctgtgagggctgcaagggcttcttccgccgcagcatccagaagaacatggtgtacacgtgtcaccgggacaagaactgcatcatcaacaaggtgacccggaaccgctgccagtactgccgactgcagaagtgctttgaagtgggcatgtccaaggagtctgtgagaaacgaccgaaacaagaagaagaaggaggtgcccaagcccgagtgctctgagagctacacgctgacgccggaggtgggggagctcattgagaaggtgcgcaaagcgcaccaggaaaccttccctgccctctgccagctgggcaaatacactacgaacaacagctcagaacaacgtgtctctctggacattgacctctgggacaagttcagtgaactctccaccaagtgcatcattaagactgtggagttcgccaagcagctgcccggcttcaccaccctcaccatcgccgaccagatcaccctcctcaaggctgcctgcctggacatcctgatcctgcggatctgcacgcggtacacgcccgagcaggacaccatgaccttctcggacgggctgaccctgaaccggacccagatgcacaacgctggcttcggccccctcaccgacctggtctttgccttcgccaaccagctgctgcccctggagatggatgatgcggagacggggctgctcagcgccatctgcctcatctgcggagaccgccaggacctggagcagccggaccgggtggacatgctgcaggagccgctgctggaggcgctaaaggtctacgtgcggaagcggaggcccagccgcccccacatgttccccaagatgctaatgaagattactgacctgcgaagcatcagcgccaagggggctgagcgggtgatcacgctgaagatggagatcccgggctccatgccgcctctcatccaggaaatgttggagaactcagagggcctggacactctgagcggacagccggggggtggggggcgggacgggggtggcctggcccccccgccaggcagctgtagccccagcctcagccccagctccaacagaagcagcccggccacccactccccgtgaccgcccacgccacatggacacagccctcgccctccgccccggcttttctctgcctttctaccgaccatgtgaccccgcaccagccctgcccccacctgccctcccgggcagtactggggaccttccctgggggacggggagggaggaggcagcgactccttggacagaggcctgggccctcagtggactgcctgctcccacagcctgggctgacgtcagaggccgaggccaggaactgagtgaggcccctggtcctgggtctcaggatgggtcctgggggcctcgtgttcatcaagacacccctctgcccagctcaccacatcttcatcaccagcaaacgccaggacttggctcccccatcctcagaactcacaagccattgctccccagctggggaacctcaacctcccccctgcctcggttggtgacagagggggtgggacaggggcggggggttccccctgtacataccctgccataccaaccccaggtattaattctcgctggttttgtttttattttaatttttttgttttgatttttttaataagaattttcattttaagcacatttatactgaaggaatttgtgctgtgtattggggggagctggatccagagctggagggggtgggtccgggggagggagtggctcggaaggggcccccactctcctttcatgtccctgtgccccccagttctcctcctcagccttttcctcctcagttttctctttaaaactgtgaagtactaactttccaaggcctgccttcccctccctcccactggagaagccgccagcccctttctccctctgcctgaccactgggtgtggacggtgtggggcagccctgaaaggacaggctcctggccttggcacttgcctgcacccaccatgaggcatggagcagggcagagcaagggccccgggacagagttttcccagacctggctcctcggcagagctgcctcccgtcagggcccacatcatctaggctccccagcccccactgtgaaggggctggccaggggcccgagctgcccccacccccggcctcagccaccagcacccccatagggcccccagacaccacacacatgcgcgtgcgcacacacacaaacacacacacactggacagtagatgggccgacacacacttggcccgagttcctccatttccctggcctgccccccacccccaacctgtcccacccccgtgccccctccttaccccgcaggacgggcctacaggggggtctcccctcacccctgcacccccagctgggggagctggctctgccccgacctccttcaccaggggttggggccccttcccctggagcccgtgggtgcacctgttactgttgggctttccactgagatctactggataaagaataaagttctatttattct

SEQ ID NO: 540 - protein, 462 aa, Homo sapiens
MASNSSSCPTPGGGHLNGYPVPPYAFFFPPMLGGLSPPGALTTLQHQLPVSGYSTPSPATIETQSSSSEEIVPSPPSPPPLPRIYKPCFVCQDKSSGYHYGVSACEGCKGFFRRSIQKNMVYTCHRDKNCIINKVTRNRCQYCRLQKCFEVGMSKESVRNDRNKKKKEVPKPECSESYTLTPEVGELIEKVRKAHQETFPALCQLGKYTTNNSSEQRVSLDIDLWDKFSELSTKCIIKTVEFAKQLPGFTTLTIADQITLLKAACLDILILRICTRYTPEQDTMTFSDGLTLNRTQMHNAGFGPLTDLVFAFANQLLPLEMDDAETGLLSAICLICGDRQDLEQPDRVDMLQEPLLEALKVYVRKRRPSRPHMFPKMLMKITDLRSISAKGAERVITLKMEIPGSMPPLIQEMLENSEGLDTLSGQPGGGGRDGGGLAPPPGSCSPSLSPSSNRSSPATHSP

SEQ ID NO: 541 - DNA, 3809 bp, Homo sapiens
gccgctgttatgcgtattcccgtagacccaagcaccagccgccgcttcacacctccctccccggccttcccctgcggcggcggcggcggcaagatgggcgagaacagcggcgcgctgagcgcgcaggcggccgtggggcccggagggcgcgcccggcccgaggtgcgctcgatggtggacgtgctggcggaccacgcaggcgagctcgtgcgcaccgacagccccaacttcctctgctccgtgctgccctcgcactggcgctgcaacaagacgctgcccgtcgccttcaaggtggtggcattgggggacgtgccggatggtacggtggtgactgtgatggcaggcaatgacgagaactactccgctgagctgcgcaatgcctcggccgtcatgaagaaccaggtggccaggttcaacgaccttcgcttcgtgggccgcagtgggcgagggaagagtttcaccctgaccatcactgtgttcaccaaccccacccaagtggcgacctaccaccgagccatcaaggtgaccgtggacggaccccgggagcccagacggcaccggcagaagctggaggaccagaccaagccgttccctgaccgctttggggacctggaacggctgcgcatgcgggtgacaccgagcacacccagcccccgaggctcactcagcaccacaagccacttcagcagccagccccagaccccaatccaaggcacctcggaactgaacccattctccgacccccgccagtttgaccgctccttccccacgctgccaaccctcacggagagccgcttcccagaccccaggatgcattatcccggggccatgtcagctgccttcccctacagcgccacgccctcgggcacgagcatcagcagcctcagcgtggcgggcatgccggccaccagccgcttccaccatacctacctcccgccaccctacccgggggccccgcagaaccagagcgggcccttccaggccaacccgtccccctaccacctctactacgggacatcctctggctcctaccagttctccatggtggccggcagcagcagtgggggcgaccgctcacctacccgcatgctggcctcttgcaccagcagcgctgcctctgtcgccgccggcaacctcatgaaccccagcctgggcggccagagtgatggcgtggaggccgacggcagccacagcaactcacccacggccctgagcacgccaggccgcatggatgaggccgtgtggcggccctactgaccgccctggtggactcctcccgctggaggcggggaccctaacaaccttcaagaccagtgatgggccggctccgaggctccgggcgggaatgggacctgcgctccagggtggtctcggtcccagggtggtcccagctggtgggagcctctggctgcatctgtgcagccacatccttgtacagaggcataggttaccacccccaccccggcccgggatactgcccccggcccagatcctggccgtctcatcccatacttctgtggggaatcagcctcctgccacccccccggaaggacctcactgtctccagctatgcccagtgctgcatgggacccatgtctcctgggacagaggccatctctcttccagagagaggcagcattggcccacaggataagcctcaggccctgggaaacctcccgacccctgcaccttcgttggagcccctgcatcccctgggtccagccccctctgcatttacacagatttgagtcagaactggaaagtgtcccccacccccaccaccctcgagcggggttcccctcattgtacagatggggcaggacccagcacgctgctggcagagatggtttgagaacacatccaagccagtccccccagcccagcttcccctccgttcctaactgttggctttcccccagccgcacggtcccaggcccagagaagatgagtctatggcatcaggttcttaaaccaggaaagcacctacagaccggctcctccatgcactttaccagctcaacgcatccactctctgttctcttggcagggcgggggaggggggataggaggtcccctttcccctaggtggtctcataattccatttgtggagagaacaggagggccagatagataggtcctagcagaaggcattgaggtgagggatcattttgggtcagacatcaatgtccctgtcccccctgggtccagccaagctgtgccccatcccccaagcctcctgggaggatccagccaaatcttgcgactcctggcacacacctgtctgtaacctgttttgtgctctgaaagcaaatagtcctgagcaaaaaaaaaaaaaaaaaacaaaaaaacaaaaaaaaaacaaaacagtttttaaaactgattttagaaaaagaagcttaatctaacgttttcaaacacaaggtctcttacaggtatagttccgtgattatgatagctctgtgattataagcaacatccccgccccctctcccccccgcggacccccagctgcctcctgagggtgtggggttattagggtctcaatactttctcaaggggctacactccccatcaggcagcatcccaccagcctgcaccacaggctcccctgggaggacgagggaaacgctgatgagacgctgggcatctctcctctgtggctctaggacatctgtccaggaggctgggcggaggtgggcaggatgtgagaggtggggagtactggctgtgcgtggcaggacagaagcactgtaaagggctctccagcgcagctcagctgcactgcgttccgaggtgaagtcttgcccctgaattttgcaaaatgggaaagtgggcgcttgccaagggccaggctgcatggattctcacatcagagttctctggccctagaaaggcttagaaaaggcgtaagggaactcataaaggctagcagcatgcggtattttaactttctgcctcggcctctgtggatgcagaaatctgccctacaaaatgctcttcattggttgtctctgtgagagcactgtccccacccaacctgtcacaacggccagaaccatacaccagagacacactggcaggttaggcagtccttctggtgatcctattccattccctcctgctgcggtttctcttggcctgtcctcactggaaaaacagtctccatctcctcaaaatagttgctgactccctgcacccaaggggcctctccatgccttcttaggaagcagctatgaatccattgtccttgtagtttcttccctcctgttctctggttatagctggtcccaggtcagcgtgggaggcacctttgggttcccagtgcccagcactttgtagtctcatcccagattactaacccttcctgatcctggagaggcagggatagtaaataaattgctcttcctaccccatcccccatcccctgacaaaaagtgacggcagccgtactgagtctgtaaggcccaaagtgggtacagacagcctgggctggtaaaagtaggtccttatttacaaggctgcgttaaagttgtactaggcaaacacactgatgtaggaagcacgaggaaaggaagacgttttgatatagtgttactgtgagcctgtcagtagtgggtaccaatcttttgtgacatattgtcatgctgaggtgtgacacctgctgcactcatctgatgtaaaaccatcccagagctggcgagaggatggagctgggtggaaactgctttgcactatcgtttgcttggtgtttgtttttaacgcacaacttgcttgtacagtaaactgtcttctgtactatttaactgta

SEQ ID NO: 542 - protein, 415 aa, Homo sapiens
MRIPVDPSTSRRFTPPSPAFPCGGGGGKMGENSGALSAQAAVGPGGRARPEVRSMVDVLADHAGELVRTDSPNFLCSVLPSHWRCNKTLPVAFKVVALGDVPDGTVVTVMAGNDENYSAELRNASAVMKNQVARFNDLRFVGRSGRGKSFTLTITVFTNPTQVATYHRAIKVTVDGPREPRRHRQKLEDQTKPFPDRFGDLERLRMRVTPSTPSPRGSLSTTSHFSSQPQTPIQGTSELNPFSDPRQFDRSFPTLPTLTESRFPDPRMHYPGAMSAAFPYSATPSGTSISSLSVAGMPATSRFHHTYLPPPYPGAPQNQSGPFQANPSPYHLYYGTSSGSYQFSMVAGSSSGGDRSPTRMLASCTSSAASVAAGNLMNPSLGGQSDGVEADGSHSNSPTALSTPGRMDEAVWRPY

SEQ ID NO: 543 - DNA, 1864 bp, Homo sapiens
  misc_feature (1516)..(1516): wherein "n" equals a, c, g, or t.
atcagaccaaacattgtctggcttgcactgtaaaactagttagctgaagacgacttctcaggtttcttcaggatgcctgcagcacttgtggagaatagccaggttatctgtgaagtgtgggccagtaatctagaagaagagatgaggaagatccgagaaatcgtgctcagttacagttatattgccatggacacagaatttccaggtgttgtggtgcgaccaattggtgaatttcgtagttccatagattaccaatatcagcttctgcggtgcaatgttgaccttttaaaaattatccagctgggccttacattcacaaatgagaagggagagtatccttctggaatcaatacttggcagttcaatttcaaatttaaccttacagaggacatgtactcccaggattccatagatctccttgctaactcaggactacagtttcagaagcatgaagaggaagggattgacacactgcactttgcagagctgcttatgacatcaggagtggttctctgtgacaatgtcaaatggctttcatttcatagtggctatgattttggctatatggtaaagttgcttacagattctcgtttgccagaagaggaacatgaattctttcatattctgaaccttttcttcccatccatttatgatgtgaaatacctgatgaagagctgcaaaaatcttaagggaggtcttcaggaagttgctgatcagttggatttgcagaggattggaaggcagcaccaggcaggctcagactcactgctgacaggaatggctttctttaggatgaaagagttgttttttgaggacagcattgatgatgccaagtactgtgggcggctctatggcttaggcacaggagtggcccagaagcagaatgaggatgtggactctgcccaggagaagatgagcatcctggcgattatcaacaacatgcagcagtgatggcgccaggctctgcagggtgggcctgatcccagagtggtgcttactgtgctgactgtgtacttatcttccccaagagaaaatgcttcttttgagcacactgtacctaccatctgcattgagcagaaagacttttgttttactgaagacaaaagatgtttttattttagacccagaagagaggagtttgctctgaatttgtaaataagtcttccccattcctcatactcgagcctctcctctctggttgcctcctgccaccagcatccatggctcatttgacacctttttaaatatcaggacaagtctgaaacaaagtagtaaaatgtatataactcttacctgttgtcattctttttcttttaaatttgttgctaatctctgataatgaagattcttactctgattctcagctgagctgtgagggcttccagggaaaatggaacaaaatggtgttcttaggtaatgggttgtagatactgagtcttcctttccttttctgacccttctcgaggacatttgctttcctcacacttttgtagtctctctttacatattactatantggaaatgaattgctctgtgctgaaatttgaagaccagataatgaaactgaaaagcaaacaattttactgaatctgtctacccttcattcatgagaactccagaatgagtgttgaccactgaagcatcttttaagtctgtgttccattgtgccattcaggtttgctgtcacatatgcatcatctgaaatcatttgaaatttttgtacaataaaatatcctggatttgatcctgaaggaaactagtaagatcagatttttgggtcatgtctgttgattttcagtaatgtgatttcagatggcatctggattctcccctctctactcattattctctactttccttccac

SEQ ID NO: 544 - protein, 292 aa, Homo sapiens
MPAALVENSQVICEVWASNLEEEMRKIREIVLSYSYIAMDTEFPGVVVRPIGEFRSSIDYQYQLLRCNVDLLKIIQLGLTFTNEKGEYPSGINTWQFNFKFNLTEDMYSQDSIDLLANSGLQFQKHEEEGIDTLHFAELLMTSGVVLCDNVKWLSFHSGYDFGYMVKLLTDSRLPEEEHEFFHILNLFFPSIYDVKYLMKSCKNLKGGLQEVADQLDLQRIGRQHQAGSDSLLTGMAFFRMKELFFEDSIDDAKYCGRLYGLGTGVAQKQNEDVDSAQEKMSILAIINNMQQ

SEQ ID NO: 545 - DNA, 1930 bp, Homo sapiens
cggctgcgcctcgcttcagcgatggccgcggagctgagcatggggccagagctgcccaccagcccgctggccatggagtatgtcaacgacttcgacctgctcaagttcgacgtgaagaaggagccactggggcgcgcggagcgtccgggcaggccctgcacacgcctgcagccagccggctcggtgtcctccacaccgctcagcactccgtgtagctccgtgccctcgtcgcccagcttcagcccgaccgaacagaagacacacctcgaggatctgtactggatggcgagcaactaccagcagatgaaccccgaggcgctcaacctgacgcccgaggacgcggtggaagcgctcatcggctcgcacccagtgccacagccgctgcaaagcttcgacagctttcgcggcgctcaccaccaccaccatcaccaccaccctcacccgcaccacgcgtacccgggcgccggcgtggcccacgacgagctgggcccgcacgctcacccgcaccatcaccatcatcaccaagcgtcgccgccgccgtccagcgccgctagcccggcgcaacagctgcccactagccaccccgggcccgggccgcacgcgacggcctcggcgacggcggcgggcggcaacggcagcgtggaggaccgcttctccgacgaccagctcgtgtccatgtccgtgcgcgagctgaaccgccacctgcggggcttcaccaaggacgaggtgatccgcctgaagcagaagcggcggaccctgaagaaccggggctacgcccagtcttgcaggtataaacgcgtccagcagaagcaccacctggagaatgagaagacgcagctcattcagcaggtggagcagcttaagcaggaggtgtcccggctggcccgcgagagagacgcctacaaggtcaagtgcgagaaactcgccaactccggcttcagggaggcgggctccaccagcgacagcccctcctctcccgagttctttctgtgagtcgtggccggtcctggcccccgcccttgccccggcccggactccctgtcccacgtccctagtcccagactaccccggaccctgtccctgccgcggccccagccttgacctgtttgacttgagcgagagggaggaagggcgcgcgggccgcgggcgacgggcgggtgcgcgggcgggcaggggaccttggctaaggcgagagtagcgcacgccagcgccgcctcctagactcgagcagagccggagagagagacgagagggtgggaggtcccggagtaacttctctccaggctgaagggcggcgaggcatagtcccgagaagtcaccaaggccatctggagactcctggctttctgaactttgcgcgttaagccgggacagctgctttgctgcccggagagtagtccgcgccaggaagagagcaacgaggaaaggagagggactctggcgtcccggcaggcgagaggcgaggctgagcgaaagaaggaaggacagacggacctgtctgtcagagttcggagaacactggctctcagccctgagacacaggcctcagttaggacgctcggcgcccaaatctcatcagttttattgcctgctcgattatatagaaaaatacaaaaaatctgcattaaaaatattaatcctgcatgctggacatgtatggtaataatttctattttgtaccattttcttgtttaactttagcatgttgttgatcatggatcatactccccttgtttctttgggtgagaagggatcgcagtttggaaactccggcggctgcgtgcggggtttcagtcccagctgtaggcttgtaaatacccgccccgccaaaccgcatagagaacgtggcagcaagctgagggtctttgtttgggtttattattacggtatttttgtttgtaagttaaaaaaaaaaaaaaaaaaaaaaaag

SEQ ID NO: 546 - protein, 323 aa, Homo sapiens
MAAELSMGPELPTSPLAMEYVNDFDLLKFDVKKEPLGRAERPGRPCTRLQPAGSVSSTPLSTPCSSVPSSPSFSPTEQKTHLEDLYWMASNYQQMNPEALNLTPEDAVEALIGSHPVPQPLQSFDSFRGAHHHHHHHHPHPHHAYPGAGVAHDELGPHAHPHHHHHHQASPPPSSAASPAQQLPTSHPGPGPHATASATAAGGNGSVEDRFSDDQLVSMSVRELNRHLRGFTKDEVIRLKQKRRTLKNRGYAQSCRYKRVQQKHHLENEKTQLIQQVEQLKQEVSRLARERDAYKVKCEKLANSGFREAGSTSDSPSSPEFFL

SEQ ID NO: 547 - DNA, 5817 bp, Homo sapiens
cgggatggcaactgcggtcaccctgctaaagtcggggcggggcggcggtcctccccctcaccccccccagtccgagcgccgccgccgccgccgccgccgccgccggccgcttcagtaacacgtccccaggagactcgcaggagcaacacgtgatgtgtctacttatcagggttgctccgagtgtgtgttccaggagtggtggctctgaggtgtgaccctgcccacgtttgggcccagccaccttcagccccccaataaggtgggcagcttgataacacaaagaaaacagtgtcaacgagtactaccaagagaagaagacaagaagtcaacacagactcattttctactccgtgtgaatgatagctacagcaggggaaagtttcatagtctatcagtgggtcagaaaatggagttttatagcagaggcttcttagaagcttaaacccctgtcccaatgacgtcaagttcgtcccgctggcttggaaggttcagacctatcttccatcaacaccatgatgtcggcggtcatgagtgtagggaaggtcacagagaatggcgggagcccccaggggatcaagtccccctcgaagcctccaggaccaaatcggattggcagaaggaaccaggaaacgaaagaggagaagtcttcctataactgccccctgtgtgagaagatttgcactacccagcaccagctgaccatgcacattcgccagcacaacacagacactggaggagccgaccactcatgcagcatctgcggaaagtcactgagctcggccagctccctcgatcgccacatgctggtgcactctggcgagaggccttacaagtgcactgtgtgtggccagtcatttaccaccaatgggaacatgcacagacatatgaagatccatgagaaggacccaactagtgccacagccacagccccaggtagaggagactttgcatccgctaagtcctccaagaggaaactgagtcacgatgccgagtcagagagagaagacccagcaccagctaaaaagatggtagaagacgggcagtcaggtgacttggagaagaaagctgatgaagtctttcactgcccagtatgtttcaaggagtttgtttgcaagtatggactggagacccacatggagacccattcagataacccactaagatgtgacatttgttgtgtcacctttcgaacacatcgaggactgctgcgtcacaacgcgcttgtccacaaacaacttcccagggatgcaatgggcagacctttcatacagaacaacccttcaattcctgctggcttccacgacttaggattcacggacttctcctgtaggaagtttcctcgcatttctcaggcctggtgcgaaacaaacctgcggaggtgcatcagcgagcaacaccgttttgtctgcgacacctgtgacaaggcgttccccatgctctgctcagtggctctgcacaagcagacccacgtggcggcagaccagggtcaagaaaagccgcaggccacgcccctgcctggtgacgccctggaccagaagggcttcctggccttgcttggcctgcagcacaccaaagacgtcaggcctgcccccgccgaggagcccctgccggatgacaaccaggcaattcagctccagacactcaagtgtcagctacctcaggaccccggctgcaccaacctgctgagcctgtcacctttcgaagctgcttccctaggcggttctctcacagttctccccgcaaccaaggacagcataaagcacctgtccctgcagcccttccagaagggcttcatcatccagcctgacagcagcattgtggtcaagcccatctctggcgagtcggccatcgagctggcagacatccagcaaattctgaagatggcagcctcggctccccctcagatcagtcttccgcccttctccaaggcccctgccgccccactgcaggcgatcttcaagcacatgccccctctgaaggcaaagcccctggtcacaccacggacggtggtgggccacctccacgcccccgcctctcatcaacgccagcaggcttcccggctgtatcagccccagcctgccgccaccgcccctgaagctcctcaaaggctcactggaggcggcctccaacgcccacctgctgcagtccaagtccgggacccagccccacgcggccacgcggctctccctgcagcgcagccgcgggcggagctgccgggccagcctgagatgaagacgcagctggagcaggacagcatcatcgaggccctgctgccgctgagcatggaggccaagatcaagcaggagatcacagagggggaactcaaggccttcatgacagcgcccggcggcaagaagacgcccgccatgcgcaaggtgctctacccttgccgcttctgcaaccaggtgtttgccttctcgggggtcttgcgtgcccacgtgcgctcccacctgggcatctcgccataccagtgcaacatctgcgactacatcgccgccgacaaggccgcgctcatccgccacctgcgcacgcacagtggggagcggccctacatttgcaagatctgccactaccccttcactgtcaaagccaactgcgagcggcacctgcgcaagaagcacctcaaggccacccgcaaggatatcgagaagaacatcgagtatgtgagtagcagcgcggccgagctggtggacgccttctgcgccccggacaccgtgtgccggctgtgcggcgaggacctcaagcactatcgtgccctgcgcatccacatgccgacgcactgcggccgcggcctgggcgggggccacaagggccgcaagcccttcgagtgcaaggagtgcagcgccgcgttcgcggccaagcgcaactgcatccaccacatcctcaagcagcacctgcacgtgcccgagcaggacatcgagagctacgtgctggccgccgacggcctgggccccgcagaggcgccggccgctgaggcgtcggggcgcggggaggacagtggctgcgctgcccttggtgactgcaagcccctcactgccttcctggaaccccagaacggctttcttcacaggggccccacccagcctccacctccccatgtctcgatcaagttggagcccgccagtagctttgcggtggacttcaatgagcccctggacttctcgcagaagggcctggccctggtccaagtgaagcaggaaaacatctcctttctgagcccttcttccctggtcccctatgactgctccatggagcccatcgacctgtccatccccaagaacttcaggaaaggggacaaggatttggccactcccagcgaagccaagaagcctgaggaggaggcggggagcagcgagcagccctctccctgcccagcacccggcccttctcttcctgtaactttggggcccagcggaatcctggaaagccccatggcccctgctccggcggccaccccggaacccccagcacagcccctgcagggccctgttcagctggcggtcccaatctactcctcagccctggtcagcagccctccactcgtgggcagctcagccctcctgagtggcacagccttgctgcgtccactgcggcccaagcccccgctgcttttgccaaagccccccgtgacagaagagctgcccccgctggcctccattgcccagatcatctcatctgtatcctcggcccccaccctgctgaaaaccaaggtggcggacccagggcccgcaagcactggcagtaacaccacggcttcagacagcttaggaggttctgtccccaaagccgccaccaccgccacccccgctgccaccaccagcccaaaagagtctagtgagcctcccgctccagccacaggcccagaggctgcctctcccaccgagcagggcccagcgggcacgtcgaagaagaggggccggaaaagggggatgaggagccgaccccgcgccaacagcggcggggtggacctgtactccagcggggagtttgccagcatcgagaagatgctggccactacagacaccaacaagttcagtccgtttctgcagacagcggaggacaacactcaggatgaggtggccggagcccctgccgaccaccatgggcccagtgatgaagagcagggcagtcccccagaagacaagctgctgagggccaagcggaactcgtacaccaactgcctgcagaagatcacctgtccccactgtccccgggttttcccttgggccagctccctacagaggcacatgctcacacacactgacagtcagtcggatgcgggagactgcagccgccgcgggcgaagtggctatgacctcacctcacgggacagagagcagccgtcggagggcgccactgagctccgccaggtcgcaggggatgcgcctgtggagcaggccacggcggaaacggcctcgcggtgcaccgggaagagcacgggcgtggggagagccatgagccggaggaggagcatggcactgaggagagcactggggacgccgacgcggaagaggacgcgtcgagcaaccagagcctggacctggacttcgccaccaagctcatggacttcaagctggcggagggcgacgcggaggcaggccgggggcgcggcctcgcaggagcagaagctcgcctgcgacgcctgtgggaagagcttcaagttcctgggcaccctgagccgccaccggaaggcgcacggccgcccaggaggcccaaggacgagaagggagatggcgccagcactgcagaggaggggccccagcccgcccctgaacaggaggagaagccccccgagaccccggcagaggtggtggagtcggcccgggtcggggaggccccggccggaaaagctcgcggaggagacggagggcccctccgacggggagagcgcggccgagaaaaggtcctcagagaagagcgacgatgacaagaaaccaaagacagactcccccaaaagcgtggccagcaaggcagacaagaggaagaaggtctgcagcgtgtgcaacaagcggttctggtcgctgcaggacctgagccggcacatgcgctcccacacaggggaaaggccatacaaatgtcagacctgcgagcgaaccttcaccttgaagcacagcctggttcgccaccagcggatccaccagaaagccaggcatgccaaacaccacgggaaggacagcgacaaggaagagcggggtgaggaggacagcgagaatgagtccacccacagcggcaacaacgccgtctcagagaacgaggctgagctggctcccaatgccagcaaccacatggctgtcacccggagccggaaggagggcttggccagtgccaccaaggactgcagccacagggaggagaaggtcacgcagggtggccgtctgagcctggccagggtgaccttaacccagagagcccggcggccctggggcaggacctgctggagccgcgcagcaagaggcctgcccacccaatcctggcacagctgatggcgcctcccagctcgtcgtaggggatggagtgacagcctcagccccctcagcacagacaaaagccagcagagcaaagcgtctatacttcatggggtttcctcagtgccctttggctgttgaggagtgagagagagagagagagagagagagagagagagagacaagcaggagcgtggctgctcgctcagtgccatagccttaccgcagcctgcgcgggaggccacagcccgtgccgattccagtgccttaactacttaccggatccctccatattatcatgggtgttgtatttttccaaaatgacttcttaaacaaaacaaatattataatg

SEQ ID NO: 548 - protein, 1656 aa, Homo sapiens
MMSAVMSVGKVTENGGSPQGIKSPSKPPGPNRIGRRNQETKEEKSSYNCPLCEKICTTQHQLTMHIRQHNTDTGGADHSCSICGKSLSSASSLDRHMLVHSGERPYKCTVCGQSFTTNGNMHRHMKIHEKDPTSATATAPGRGDFASAKSSKRKLSHDAESEREDPAPAKKMVEDGQSGDLEKKADEVFHCPVCFKEFVCKYGLETHMETHSDNPLRCDICCVTFRTHRGLLRHNALVHKQLPRDAMGRPFIQNNPSIPAGFHDLGFTDFSCRKFPRISQAWCETNLRRCISEQHRFVCDTCDKAFPMLCSVALHKQTHVAADQGQEKPQATPLPGDALDQKGFLALLGLQHTKDVRPAPAEEPLPDDNQAIQLQTLKCQLPQDPGCTNLLSLSPFEAASLGGSLTVLPATKDSIKHLSLQPFQKGFIIQPDSSIVVKPISGESAIELADIQQILKMAASAPPQISLPPFSKAPAAPLQAIFKHMPPLKAKPLVTPRTVVGHLHAPASHQRQQASRLYQPQPAATAPEAPQRLTGGGLQRPPAAVQVRDPAPRGHAALPAAQPRAELPGQPEMKTQLEQDSIIEALLPLSMEAKIKQEITEGELKAFMTAPGGKKTPAMRKVLYPCRFCNQVFAFSGVLRAHVRSHLGISPYQCNICDYIAADKAALIRHLRTHSGERPYICKICHYPFTVKANCERHLRKKHLKATRKDIEKNIEYVSSSAAELVDAFCAPDTVCRLCGEDLKHYRALRIHMPTHCGRGLGGGHKGRKPFECKECSAAFAAKRNCIHHILKQHLHVPEQDIESYVLAADGLGPAEAPAAEASGRGEDSGCAALGDCKPLTAFLEPQNGFLHRGPTQPPPPHVSIKLEPASSFAVDFNEPLDFSQKGLALVQVKQENISFLSPSSLVPYDCSMEPIDLSIPKNFRKGDKDLATPSEAKKPEEEAGSSEQPSPCPAPGPSLPVTLGPSGILESPMAPAPAATPEPPAQPLQGPVQLAVPIYSSALVSSPPLVGSSALLSGTALLRPLRPKPPLLLPKPPVTEELPPLASIAQIISSVSSAPTLLKTKVADPGPASTGSNTTASDSLGGSVPKAATTATPAATTSPKESSEPPAPATGPEAASPTEQGPAGTSKKRGRKRGMRSRPRANSGGVDLYSSGEFASIEKMLATTDTNKFSPFLQTAEDNTQDEVAGAPADHHGPSDEEQGSPPEDKLLRAKRNSYTNCLQKITCPHCPRVFPWASSLQRHMLTHTDSQSDAGDCSRRGRSGYDLTSRDREQPSEGATELRQVAGDAPVEQATAETASRCTGKSTGVGRAMSRRRSMALRRALGTPTRKRTRRATRAWTWTSPPSSWTSSWRRATRRQAGGAASQEQKLACDACGKSFKFLGTLSRHRKAHGRPGGPRTRREMAPALQRRGPSPPLNRRRSPPRPRQRWWSRPGSGRPRPEKLAEETEGPSDGESAAEKRSSEKSDDDKKPKTDSPKSVASKADKRKKVCSVCNKRFWSLQDLSRHMRSHTGERPYKCQTCERTFTLKHSLVRHQRIHQKARHAKHHGKDSDKEERGEEDSENESTHSGNNAVSENEAELAPNASNHMAVTRSRKEGLASATKDCSHREEKVTQGGRLSLARVTLTQRARRPWGRTCWSRAARGLPTQSWHS

SEQ ID NO: 549 - DNA, 3791 bp, Homo sapiens
tttttagaaaaaaaaaatatatttccctcctgctccttctgcgttcacaagctaagttgtttatctcggctgcggcgggaactgcggacggtggcgggcgagcggctcctctgccagagttgatattcactgatggactccaaagaatcattaactcctggtagagaagaaaaccccagcagtgtgcttgctcaggagaggggagatgtgatggacttctataaaaccctaagaggaggagctactgtgaaggtttctgcgtcttcaccctcactggctgtcgcttctcaatcagactccaagcagcgaagacttttggttgattttccaaaaggctcagtaagcaatgcgcagcagccagatctgtccaaagcagtttcactctcaatgggactgtatatgggagagacagaaacaaaagtgatgggaaatgacctgggattcccacagcagggccaaatcagcctttcctcgggggaaacagacttaaagcttttggaagaaagcattgcaaacctcaataggtcgaccagtgttccagagaaccccaagagttcagcatccactgctgtgtctgctgcccccacagagaaggagtttccaaaaactcactctgatgtatcttcagaacagcaacatttgaagggccagactggcaccaacggtggcaatgtgaaattgtataccacagaccaaagcacctttgacattttgcaggatttggagttttcttctgggtccccaggtaaagagacgaatgagagtccttggagatcagacctgttgatagatgaaaactgtttgctttctcctctggcgggagaagacgattcattccttttggaaggaaactcgaatgaggactgcaagcctctcattttaccggacactaaacccaaaattaaggataatggagatctggttttgtcaagccccagtaatgtaacactgccccaagtgaaaacagaaaaagaagatttcatcgaactctgcacccctggggtaattaagcaagagaaactgggcacagtttactgtcaggcaagctttcctggagcaaatataattggtaataaaatgtctgccatttctgttcatggtgtgagtacctctggaggacagatgtaccactatgacatgaatacagcatccctttctcaacagcaggatcagaagcctatttttaatgtcattccaccaattcccgttggttccgaaaattggaataggtgccaaggatctggagatgacaacttgacttctctggggactctgaacttccctggtcgaacagttttttctaatggctattcaagccccagcatgagaccagatgtaagctctcctccatccagctcctcaacagcaacaacaggaccacctcccaaactctgcctggtgtgctctgatgaagcttcaggatgtcattatggagtcttaacttgtggaagctgtaaagttttcttcaaaagagcagtggaaggacagcacaattacctatgtgctggaaggaatgattgcatcatcgataaaattcgaagaaaaaactgcccagcatgccgctatcgaaaatgtcttcaggctggaatgaacctggaagctcgaaaaacaaagaaaaaaataaaaggaattcagcaggccactacaggagtctcacaagaaacctctgaaaatcctggtaacaaaacaatagttcctgcaacgttaccacaactcacccctaccctggtgtcactgttggaggttattgaacctgaagtgttatatgcaggatatgatagctctgttccagactcaacttggaggatcatgactacgctcaacatgttaggagggcggcaagtgattgcagcagtgaaatgggcaaaggcaataccaggtttcaggaacttacacctggatgaccaaatgaccctactgcagtactcctggatgtttcttatggcatttgctctggggtggagatcatatagacaatcaagtgcaaacctgctgtgttttgctcctgatctgattattaatgagcagagaatgactctaccctgcatgtacgaccaatgtaaacacatgctgtatgtttcctctgagttacacaggcttcaggtatcttatgaagagtatctctgtatgaaaaccttactgcttctctcttcagttcctaaggacggtctgaagagccaagagctatttgatgaaattagaatgacctacatcaaagagctaggaaaagccattgtcaagagggaaggaaactccagccagaactggcagcggttttatcaactgacaaaactcttggattctatgcatgaaaatgttatgtggttaaaaccagaaagcacatctcacacattaatctgattttcatcccaacaatcttggcgctcaaaaaatagaactcaatgagaaaaagaagattatgtgcacttcgttgtcaataataagtcaactgatgctcatcgacaactataggaggcttttcattaaatgggaaaagaagctgtgcccttttaggatacgtgggggaaaagaaagtcatcttaattatgtttaattgtggatttaagtgctatatggtggtgctgtttgaaagcagatttatttcctatgtatgtgttatctggccatcccaacccaaactgttgaagtttgtagtaacttcagtgagagttggttactcacaacaaatcctgaaaagtatttttagtgtttgtaggtattctgtgggatactatacaagcagaactgaggcacttaggacataacacttttggggtatatatatccaaatgcctaaaactatgggaggaaaccttggccaccccaaaaggaaaactaacatgatttgtgtctatgaagtgctggataattagcatgggatgagctctgggcatgccatgaaggaaagccacgctcccttcagaattcagaggcagggagcaattccagtttcacctaagtctcataattttagttcccttttaaaaaccctgaaaactacatcaccatggaatgaaaaatattgttatacaatacattgatctgtcaaacttccagaaccatggtagccttcagtgagatttccatcttggctggtcactccctgactgtagctgtaggtgaatgtgtttttgtgtgtgtgtgtctggttttagtgtcagaagggaaataaaagtgtaaggaggacactttaaaccctttgggtggagtttcgtaatttcccagactattttcaagcaacctggtccacccaggattagtgaccaggttttcaggaaaggatttgcttctctctagaaaatgtctgaaaggattttattttctgatgaaaggctgtatgaaaataccctcctcaaataacttgcttaactacatatagattcaagtgtgtcaatattctattttgtatattaaatgctatataatggggacaaatctatattatactgtgtatggcattattaagaagctttttcattattttttatcacagtaattttaaaatgtgtaaaaattaaaaccagtgactcctgtttaaaaataaaagttgtagttttttattcatgctgaataataatctgtagttaaaaaaaaagtgtctttttacctacgcagtgaaatgtcagactgtaaaaccttgtgtggaaatgtttaacttttattttttcatttaaatttgctgttctggtattaccaaaccacacatttgtaccgaattggcagtaaatgttagccatttacagcaatgccaaatatggagaaacatcataataaaaaaatctgcttttttc

SEQ ID NO: 550 - protein, 742 aa, Homo sapiens
MDSKESLTPGREENPSSVLAQERGDVMDFYKTLRGGATVKVSASSPSLAVASQSDSKQRRLLVDFPKGSVSNAQQPDLSKAVSLSMGLYMGETETKVMGNDLGFPQQGQISLSSGETDLKLLEESIANLNRSTSVPENPKSSASTAVSAAPTEKEFPKTHSDVSSEQQHLKGQTGTNGGNVKLYTTDQSTFDILQDLEFSSGSPGKETNESPWRSDLLIDENCLLSPLAGEDDSFLLEGNSNEDCKPLILPDTKPKIKDNGDLVLSSPSNVTLPQVKTEKEDFIELCTPGVIKQEKLGTVYCQASFPGANIIGNKMSAISVHGVSTSGGQMYHYDMNTASLSQQQDQKPIFNVIPPIPVGSENWNRCQGSGDDNLTSLGTLNFPGRTVFSNGYSSPSMRPDVSSPPSSSSTATTGPPPKLCLVCSDEASGCHYGVLTCGSCKVFFKRAVEGQHNYLCAGRNDCIIDKIRRKNCPACRYRKCLQAGMNLEARKTKKKIKGIQQATTGVSQETSENPGNKTIVPATLPQLTPTLVSLLEVIEPEVLYAGYDSSVPDSTWRIMTTLNMLGGRQVIAAVKWAKAIPGFRNLHLDDQMTLLQYSWMFLMAFALGWRSYRQSSANLLCFAPDLIINEQRMTLPCMYDQCKHMLYVSSELHRLQVSYEEYLCMKTLLLLSSVPKDGLKSQELFDEIRMTYIKELGKAIVKREGNSSQNWQRFYQLTKLLDSMHENVMWLKPESTSHTLI

SEQ ID NO: 551 - DNA, 794 bp, Homo sapiens
attcggcacgaggggaaagagggtcgtggtattgtaagcccagccggtagtgcccattctttttggggttaaaggtatgtcggatttagttctaggtgtgacggctgtgtgtctgtctgtgtgtgtacaaggctgtgtgcatctgcggtgtcagtgtgtgactttggtatgtttgtgtgtcggtgggaacgtgttaggtccacgtgccggtgggtgtatgtgaatgtgtctggttgggtgcctcctggcctacctttgtcatccctggggggcgacagctctggggtctggccaggccgctccagggcagtgggtgagcgccgctcttcccgctcgcaggcaaacctctactctggagccccttcttgcagaggcctctgcataaaaggaaaggcggccaggtgagattctccaacgaccagaccatcgagctggagaagaaattcgagacgcagaaatatctctctccgcccgagaggaagcgtctggccaagatgctgcagctcagcgagagacaggtcaaaacctggtttcagaatcgacgcgctaaatggaggagactaaaacaggagaaccctcaaagcaataaaaaagaagaactggaaagtttggacagttcctgtgatcagaggcaagatttgcccagtgaacagaataaaggtgcttctttggatagctctcaatgttcgccctcccctgcctcccaggaagaccttgaatcagagatttcagaggattctgatcaggaagtggacattgagggcgataaaagctattttaatgctggatgatga

SEQ ID NO: 552 - protein, 149 aa, Homo sapiens
KPLLWSPFLQRPLHKRKGGQVRFSNDQTIELEKKFETQKYLSPPERKRLAKMLQLSERQVKTWFQNRRAKWRRLKQENPQSNKKEELESLDSSCDQRQDLPSEQNKGASLDSSQCSPSPASQEDLESEISEDSDQEVDIEGDKSYFNAG

SEQ ID NO: 553 - DNA, 4064 bp, Homo sapiens
atgcccgggccccgaggggctgctggcggcctggcccctgagatgcgcggggcgggggcggcggggctgctggcgctgctgctgctgctgctgctgctgctgctgggcctgggcggcagggtcgagggggggccggccggcgagcggggcgcaggcgggggcggggcgctggcccgcgagcgcttcaaggtggtctttgcgccggtgatctgcaagcggacctgtctcaagggccagtgtcgggacagttgtcagcagggctccaacatgacgctcatcggagagaacggccacagcacagacacgctcacgggctccggcttccgcgtggtggtgtgccctctcccctgcatgaatggcggccagtgctcctcgcgaaaccagtgcctgtgtcccccggacttcactgggcgcttctgccaggtgcccgcaggaggagccggtgggggtaccggcggctcaggccccggcctgagcaggacaggggccctgtccacaggggcgctgccgcccctggctccggagggcgactctgtggccagcaagcacgccatctacgccgtccaggtgatcgctgaccctcctgggcccggggaggggcctcctgcccagcacgcagccttcctggtgcccctaggcccgggacagatctcagcagaagtgcaggccccgccccccgtggtgaatgtgcgcgtccatcacccgcccgaggcctcagtccaggtgcaccgcattgagagctcgaacgccgagagcgcagccccctcccagcacctgctgccgcaccccaagccctcgcacccccggccgcccacccagaagcccctgggccgctgctttcaggacactctgcccaagcagccgtgtggcagcaaccccctccccggcctcaccaagcaggaagactgctgcggtagcatcggcactgcctggggccagagcaagtgccacaagtgtccccagctgcagtacacaggagtgcagaagccagggcctgtacgtggggaagtgggcgctgactgtccccagggctacaagaggcttaacagcacccactgccaggacatcaacgagtgcgcaatgccgggcgtgtgtcgccatggtgactgcctcaacaaccctggctcctatcgctgtgtctgcccacctggccatagtttaggcccctcccgtacacagtgcattgcagacaaaccggaggagaagagcctgtgtttccgcctggtgagccctgagcaccagtgccagcacccactgaccacccgcctgacccgccagctctgctgctgcagtgtcggcaaggcctggggcgcgcggtgtcagcgctgcccaacagatggcaccgctgcgttcaaggagatctgcccagctgggaagggataccacattctcacctcccaccagacgctcaccattcagggcgagagtgacttttcccttttcctgcaccctgacgggccacccaagccccagcagcttccggagagccctagccaggctccaccacctgaggacacagaggaagagagaggggtgaccacggactcaccggtgagtgaggagaggtcagtgcagcagagccacccaactgccaccacgactcctgcccggccctaccccgagctgatctcccgtccctcgcccccgaccatgcgctggttcctgccggacttgcctccttcccgcagcgccgtagagatcgctcccactcaggtcacagagactgatgagtgccgactgaaccagaacatctgtggccacggagagtgcgtgccgggcccccctgactactcctgccactgcaaccccggctaccggtcacatccccagcaccgctactgcgtggatgtgaacgagtgcgaggcagagccctgtggcccggggaggggcatctgcatgaacaccggcggctcctacaattgccactgcaaccgcggctaccgcctgcacgtgggcgccggggggcgctcgtgcgtggacctgaacgaatgcgccaagccccacctgtgcggcgacggcggcttctgcatcaactttcccggtcactacaagtgcaactgctaccccggctaccggctcaaagcctcccggcctcctgtgtgcgaagacatcgacgagtgccgggacccaagctcttgcccggatggcaaatgcgagaacaagcccgggagcttcaagtgcatcgcctgtcagcctggctaccgcagccaggggggcggggcctgtcgcgacgtgaacgagtgcgccgagggcagcccctgctcgcctggctggtgcgagaacctcccgggctccttccgctgcacctgtgcccagggctacgcgcccgcgcccgacggccgcagttgcttggatgtggacgagtgtgaggctggggacgtgtgtgacaatggcatctgcagcaacacgccaggatctttccagtgtcagtgcctctctggctaccatctgtccagggaccggagccactgcgaggacattgatgagtgtgacttccctgcagcctgcattgggggtgactgcatcaataccaatggctcctacagatgtctttgcccccaggggcatcggctggtgggtggcaggaaatgccaagacatagatgagtgcagccaggacccgagcctgtgccttccccatggggcctgcaagaaccttcagggctcctatgtgtgtgtctgcgatgagggcttcactcccacccaggaccagcacggttgtgaggaggtggagcagccccaccacaagaaggagtgctacctgaacttcgatgacacagtgttctgcgacagcgtattggccaccaacgtgacccagcaggagtgctgctgctctctgggggccggctggggcgaccactgcgaaatctacccctgcccagtctacagctcagccgagttccacagcctctgcccagacggaaagggctacacccaggacaacaacatcgtcaactacggcatcccagcccaccgtgacatcgacgagtgcatgttgttcgggtcggagatttgcaaggagggcaagtgcgtgaacacgcagcctggctacgagtgctactgcaagcagggcttctactacgacgggaacctgctggaatgcgtggacgtggacgagtgcctggacgagtccaactgccggaacggagtgtgtgagaacacgcgcggcggctaccgctgtgcctgcacgccccctgccgagtacagtcccgcgcagcgccagtgcctgagcccggaagagatggagcgtgccccggagcggcgcgacgtgtgctggagccagcgcggagaggacggcatgtgcgctggccccctggccgggcctgccctcaccttcgacgactgctgctgccgccagggccgcggctggggcgcccaatgccgaccgtgcccgccgcgcggcgcggggtcccattgcccgacatcgcagagcgagagcaattccttctgggacacaagccccctgctgttggggaagcccccaagagatgaggacagttcagaggaggattcagacgagtgtcgctgcgtgagtggccgctgcgtgccgcggccgggcggcgccgtgtgcgagtgtcccggcggcttccagctcgacgcctcccgcgcccgctgcgtggatatcgacgagtgccgagagctgaaccagcgcgggctgctgtgcaagagcgagcgctgcgtgaacaccagcggctccttccgctgcgtctgcaaagccggcttcgcgcgcagccgcccgcacggggcctgcgttccccagcgccgccgctgacgccgccgacgccgccctcggcccagacctcggtgatcactgagggatttccgcgagctcggcctcacttctgccccgacttgtggctcggacccagggaccttcagggcccgcagaccctcccggcgccttgagacccgaggcgcccctaccggcccccctccccggttagcgggcggttgtaaggtctccggcgggcgctgcctgccttcctcccagagggtgtttcctagaaactgataaatcagatcgtgcctctttacccttggctttcgaaaaaaaaaaaaaaaaaa

SEQ ID NO: 554 - protein, 1256 aa, Homo sapiens
MPGPRGAAGGLAPEMRGAGAAGLLALLLLLLLLLLGLGGRVEGGPAGERGAGGGGALARERFKVVFAPVICKRTCLKGQCRDSCQQGSNMTLIGENGHSTDTLTGSGFRVVVCPLPCMNGGQCSSRNQCLCPPDFTGRFCQVPAGGAGGGTGGSGPGLSRTGALSTGALPPLAPEGDSVASKHAIYAVQVIADPPGPGEGPPAQHAAFLVPLGPGQISAEVQAPPPVVNVRVHHPPEASVQVHRIESSNAESAAPSQHLLPHPKPSHPRPPTQKPLGRCFQDTLPKQPCGSNPLPGLTKQEDCCGSIGTAWGQSKCHKCPQLQYTGVQKPGPVRGEVGADCPQGYKRLNSTHCQDINECAMPGVCRHGDCLNNPGSYRCVCPPGHSLGPSRTQCIADKPEEKSLCFRLVSPEHQCQHPLTTRLTRQLCCCSVGKAWGARCQRCPTDGTAAFKEICPAGKGYHILTSHQTLTIQGESDFSLFLHPDGPPKPQQLPESPSQAPPPEDTEEERGVTTDSPVSEERSVQQSHPTATTTPARPYPELISRPSPPTMRWFLPDLPPSRSAVEIAPTQVTETDECRLNQNICGHGECVPGPPDYSCHCNPGYRSHPQHRYCVDVNECEAEPCGPGRGICMNTGGSYNCHCNRGYRLHVGAGGRSCVDLNECAKPHLCGDGGFCINFPGHYKCNCYPGYRLKASRPPVCEDIDECRDPSSCPDGKCENKPGSFKCIACQPGYRSQGGGACRDVNECAEGSPCSPGWCENLPGSFRCTCAQGYAPAPDGRSCLDVDECEAGDVCDNGICSNTPGSFQCQCLSGYHLSRDRSHCEDIDECDFPAACIGGDCINTNGSYRCLCPQGHRLVGGRKCQDIDECSQDPSLCLPHGACKNLQGSYVCVCDEGFTPTQDQHGCEEVEQPHHKKECYLNFDDTVFCDSVLATNVTQQECCCSLGAGWGDHCEIYPCPVYSSAEFHSLCPDGKGYTQDNNIVNYGIPAHRDIDECMLFGSEICKEGKCVNTQPGYECYCKQGFYYDGNLLECVDVDECLDESNCRNGVCENTRGGYRCACTPPAEYSPAQRQCLSPEEMERAPERRDVCWSQRGEDGMCAGPLAGPALTFDDCCCRQGRGWGAQCRPCPPRGAGSHCPTSQSESNSFWDTSPLLLGKPPRDEDSSEEDSDECRCVSGRCVPRPGGAVCECPGGFQLDASRARCVDIDECRELNQRGLLCKSERCVNTSGSFRCVCKAGFARSRPHGACVPQRRR

SEQ ID NO: 555 - DNA, 2704 bp, Homo sapiens
gcttagtgtaaccagcggcgtatattttttaggcgccttttcgaaaacctagtagttaatattcatttgtttaaatcttattttatttttaagctcaaactgcttaagaataccttaattccttaaagtgaaataattttttgcaaaggggtttcctcgatttggagctttttttttcttccaccgtcatttctaactcttaaaaccaactcagttccatcatggtgatgttcaagaagatcaagtcttttgaggtggtctttaacgaccctgaaaaggtgtacggcagtggcgagagggtggctggccgggtgatagtggaggtgtgtgaagttactcgtgtcaaagccgttaggatcctggcttgcggagtggctaaagtgctttggatgcagggatcccagcagtgcaaacagacttcggagtacctgcgctatgaagacacgcttcttctggaagaccagccaacaggtgagaatgagatggtgatcatgagacctggaaacaaatatgagtacaagttcggctttgagcttcctcaggggcctctgggaacatccttcaaaggaaaatatgggtgtgtagactactgggtgaaggcttttcttgaccgcccgagccagccaactcaagagacaaagaaaaactttgaagtagtggatctggtggatgtcaatacccctgatttaatggcacctgtgtctgctaaaaaagaaaagaaagtttcctgcatgttcattcctgatgggcgggtgtctgtctctgctcgaattgacagaaaaggattctgtgaaggtgatgagatttccatccatgctgactttgagaatacatgttcccgaattgtggtccccaaagctgccattgtggcccgccacacttaccttgccaatggccagaccaaggtgctgactcagaagttgtcatcagtcagaggcaatcatattatctcagggacatgcgcatcatggcgtggcaagagccttcgggttcagaagatcaggccttctatcctgggctgcaacatccttcgagttgaatattccttactgatctatgttagcgttcctggatccaagaaggtcatccttgacctgcccctggtaattggcagcagatcaggtctaagcagcagaacatccagcatggccagccgaaccagctctgagatgagttgggtagatctgaacatccctgataccccagaagctcctccctgctatatggatgtcattcctgaagatcaccgattggagagcccaacaactcctctgctagatgacatggatggctctcaagacagccctatctttatgtatgcccctgagttcaagttcatgccaccaccgacttatactgaggtggatccctgcatcctcaacaacaatgtgcagtgagcatgtggaagaaaagaagcagctttacctacttgtttctttttgtctctcttcctggacactcactttttcagagactcaacagtctcgtcaatggagtgtgggtccaccttagcctctgacttcctaatgtaggaggtggtcagcaggcaatctcctgggccttaaaggatgcggactcatcctcagccagcgcccatgttgtgatacaggggtgtttgttggatgggtttaaaaataactagaaaaactcaggcccatccattttctcagatctccttgaaaattgaggccttttcgatagtttcgggtcaggtaaaaatggcctcctggcgtaagcttttcaaggttttttggaggctttttgtaaattgtgataggaactttggaccttgaacttacgtatcatgtggagaagagccaatttaacaaactaggaagatgaaaagggaaattgtggccaaaactttgggaaaaggaggttcttaaaatcagtgtttcccctttgtgcacttgtagaaaaaaaagaaaaaccttctagagctgatttgatggacaatggagagagctttccctgtgattataaaaaaggaagctagctgctctacggtcatctttgcttagagtatactttaacctggcttttaaagcagtagtaactgccccaccaaaggtcttaaaagccatttttggagcctattgcactgtgttctcctactgcaaatattttcatatgggaggatggttttctcttcatgtaagtccttggaattgattctaaggtgatgttcttagcactttaattcctgtcaaattttttgttctccccttctgccatcttaaatgtaagctgaaactggtctactgtgtctctagggttaagccaaaagacaaaaaaaattttactacttttgagattgccccaatgtacagaattatataattctaacgcttaaatcatgtgaaagggttgctgctgtcagccttgcccactgtgacttcaaacccaaggaggaactcttgatcaagatgcccaaccctgtgatcagaacctccaaatactgccatgagaaactagagggcaggtgttcataaaagccctttgaacccccttcctgccctgtgttaggagatagggatattggcccctcactgcagctgccagcacttggtcagtcactctcagccatagcactttgttcactgtcctgtgtcagagcactgagctccacccttttctgagagttattacagccagaaagtgtgggctgaagatggttggtttcatgtgggggtattatgtaccc

SEQ ID NO: 556 - protein, 391 aa, Homo sapiens
MVMFKKIKSFEVVFNDPEKVYGSGERVAGRVIVEVCEVTRVKAVRILACGVAKVLWMQGSQQCKQTSEYLRYEDTLLLEDQPTGENEMVIMRPGNKYEYKFGFELPQGPLGTSFKGKYGCVDYWVKAFLDRPSQPTQETKKNFEVVDLVDVNTPDLMAPVSAKKEKKVSCMFIPDGRVSVSARIDRKGFCEGDEISIHADFENTCSRIVVPKAAIVARHTYLANGQTKVLTQKLSSVRGNHIISGTCASWRGKSLRVQKIRPSILGCNILRVEYSLLIYVSVPGSKKVILDLPLVIGSRSGLSSRTSSMASRTSSEMSWVDLNIPDTPEAPPCYMDVIPEDHRLESPTTPLLDDMDGSQDSPIFMYAPEFKFMPPPTYTEVDPCILNNNVQ

SEQ ID NO: 557 - DNA, 1034 bp, Homo sapiens
caggctccggctgcggctccagcccgcgatgccccattccgtgaccctgcgcgggccttcgccctggggcttccgcctggtgggcggccgggacttcagcgcgcccctcaccatctcacgggtccatgctggcagcaaggctgcattggctgccctgtgcccaggagacctgatccaggccatcaatggtgagagcacagagctcatgacacacctggaggcacagaaccgcatcaagggctgccacgatcacctcacactgtctgtgagcaggcctgagggcaggagctggcccagtgcccctgatgacagcaaggctcaggcacacaggatccacatcgatcctgagatccaggacggcagcccaacaaccagcaggcggccctcaggcaccgggactgggccagaagatggcagaccaagcctgggatctccatatggacaaccccctcgctttccagtccctcacaatggcagcagcgaggccaccctgccagcccagatgagcaccctgcatgtgtctccaccccccagcgctgacccagccagaggcctcccgcggagccgggactgcagagtcgacctgggctccgaggtgtacaggatgctgcgggagccggccgagcccgtggccgcggagcccaagcagtcaggctccttccgctacttgcagggcatgctagaggccggcgagggcggggcaccatcgtcaaggcacgggacaagctctaccatcccgagtgcttcatgtgcagtgactgcggcctgaacctcaagcagcgtggttacttctttctggacgagcggctctactgtgagagccacgccaaggcgcgcgtgaagccgcccgagggctacgacgtggtggcggtgtaccccaatgccaaggtggaactcgtctgagctgggaccctgctcccacccctgcttcttaaggtccctgctcggccggtgtaaatatgtttcaccctgtccctctaataaagctcctctgctccaccttgaaaaaaaaaaaaaaaaaaaaaaaaaaaaaa

SEQ ID NO: 558 - protein, 246 aa, Homo sapiens
MPHSVTLRGPSPWGFRLVGGRDFSAPLTISRVHAGSKAALAALCPGDLIQAINGESTELMTHLEAQNRIKGCHDHLTLSVSRPEGRSWPSAPDDSKAQAHRIHIDPEIQDGSPTTSRRPSGTGTGPEDGRPSLGSPYGQPPRFPVPHNGSSEATLPAQMSTLHVSPPPSADPARGLPRSRDCRVDLGSEVYRMLREPAEPVAAEPKQSGSFRYLQGMLEAGEGGAPSSRHGTSSTIPSASCAVTAA

SEQ ID NO: 559 - DNA, 2870 bp, Homo sapiens
ggcctgggtggcgaattcggcacgaggctcgccgctcgctatggcgtcgctcaccgtgaaggcctaccttctgggcaaggaggacgcggcgcgcgagattcgccgcttcagcttctgctgcagccccgagcctgaggcggaagccgaggctgcggcgggtccgggaccctgcgagcggctgctgagccgggtggccgccctgttccccgcgctgcggcctggcggcttccaggcgcactaccgcgatgaggacggggacttggttgccttttccagtgacgaggaattgacaatggccatgtcctacgtgaaggatgacatcttccgaatctacattaaagagaaaaaagagtgccggcgggaccaccgcccaccgtgtgctcaggaggcgccccgcaacatggtgcaccccaatgtgatctgcgatggctgcaatgggcctgtggtaggaacccgctacaagtgcagcgtctgcccagactacgacttgtgtagcgtctgcgagggaaagggcttgcaccgggggcacaccaagctcgcattccccagccccttcgggcacctgtctgagggcttctcgcacagccgctggctccggaaggtgaaacacggacacttcgggtggccaggatgggaaatgggtccaccaggaaactggagcccacgtcctcctcgtgcaggggaggcccgccctggccccacggcagaatcagcttctggtccatcggaggatccgagtgtgaatttcctgaagaacgttggggagagtgtggcagctgcccttagccctctgggcattgaagttgatatcgatgtggagcacggagggaaaagaagccgcctgacccccgtctctccagagagttccagcacagaggagaagagcagctcacagccaagcagctgctgctctgatcccagcaagccgggtgggaatgttgagggcgccacgcagtctctggcggagcagatgagaaagatcgccttggagtccgaggggcgccctgaggaacagatggagtcggataactgttcaggaggagatgatgactggacccatctgtcttcaaaagaagtggacccgtctacaggtgaactccagtccctacagatgccagaatccgaagggccaagctctctggacccctcccaggagggacccacagggctgaaggaagctgccttgtacccacatctcccgccagaggctgacccgcggctgattgagtccctctcccagatgctgtccatgggcttctctgatgaaggcggctggctcaccaggctcctgcagaccaagaactatgacatcggagcggctctggacaccatccagtattcaaagcatcccccgccgttgtgaccacttttgcccacctcttctgcgtgcccctcttctgtctcatagttgtgttaagcttgcgtagaattgcaggtctctgtacaggccagtttctctgccttcttccaggatcaggggttagggtgcaagaagccatttagggcagcaaaacaagtgacatgaagggagggtccctgtgtgtgtgtgtgtgctgatgtttcctgggtgccctggctccttgcagcagggctgggcctgcgagacccaaggctcactgcagcgcgctcctgacccctccctgcaggggctacgttagcagcccagcacatagcttgcctaatggctttcactttctcttttgttttaaatgactcataggtccctgacatttagttgattattttctgctacagacctggtacactctgattttagataaagtaagcctaggtgttgtcagcaggcaggctggggaggccagtgttgtgggcttcctgctgggactgagaaggctcacgaagggcatccgcaatgttggtttcactgagagctgcctcctggtctcttcaccactgtagttctctcatttccaaaccatcagctgcttttaaaataagatctctttgtagccatcctgttaaatttgtaaacaatctaattaaatggcatcagcactttaaccaatgacgtttgcatagagagaaatgattgacagtaagtttattgttaatggttcttacagagtatctttaaaagtgccttaggggaaccctgtccctcctaacaagtgtatctcgattaataacctgccagtcccagatcacacatcatcatcgaagtcttccccagttataaagaggtcacatagtcgtgtgggtcgaggattctgtgcctccaggaccaggggcccaccctctgcccagggagtccttgcgtcccatgaggtcttcccgcaaggcctctcagacccagatgtgacggggtgtgtggcccgaggaagctggacagcggcagtgggcctgctgaggccttctcttgaggcctgtgctctgggggtcccttgcttagcctgtgctggaccagctggcctggggtccctctgaagagaccttggctgctcactgtccacatgtgaactttttctaggtggcaggacaaatcgcgcccatttagaggatgtggctgtaacctgctggatgggactccatagctccttcccaggacccctcagctccccggcactgcagtctgcagagttctcctggaggcaggggctgctgccttgtttcaccttccatgtcaggccagcctgtccctgaaagagaagatggccatgccctccatttgtaagaacaatgccagggcccaggaggaccgcctgccctgcctgggccttggctgggcctctggttctgacactttctgctggaagctgtcaggctgggacaggctttgattttgagggttagcaagacaaagcaaataaatgccttccacctcaccgcaaaaaaaaaaaaaaaaaaaaaaa

SEQ ID NO: 560 - protein, 440 aa, Homo sapiens
MASLTVKAYLLGKEDAAREIRRFSFCCSPEPEAEAEAAAGPGPCERLLSRVAALFPALRPGGFQAHYRDEDGDLVAFSSDEELTMAMSYVKDDIFRIYIKEKKECRRDHRPPCAQEAPRNMVHPNVICDGCNGPVVGTRYKCSVCPDYDLCSVCEGKGLHRGHTKLAFPSPFGHLSEGFSHSRWLRKVKHGHFGWPGWEMGPPGNWSPRPPRAGEARPGPTAESASGPSEDPSVNFLKNVGESVAAALSPLGIEVDIDVEHGGKRSRLTPVSPESSSTEEKSSSQPSSCCSDPSKPGGNVEGATQSLAEQMRKIALESEGRPEEQMESDNCSGGDDDWTHLSSKEVDPSTGELQSLQMPESEGPSSLDPSQEGPTGLKEAALYPHLPPEADPRLIESLSQMLSMGFSDEGGWLTRLLQTKNYDIGAALDTIQYSKHPPPL

SEQ ID NO: 561 - DNA, 2605 bp, Homo sapiens
atgtctctctctcttttctttcagtctgcaactgtgtctgatggcgagttgacgggcgccgacctgaaggactgcgtcagcaacaacagcctgagcagcaatgccagcctccccagcgtgcagagctgccggcgcctgcgtgagaggagggtcgccagctgggccgtgtcctttgagcgcctgctgcaggaccccgtcggtgtccgctacttctctgattttctaaggaaagaattcagtgaagaaaacattttattctggcaggcctgtgaatattttaatcatgttcctgcacatgacaaaaaggagctttcctacagggcccgggagattttcagtaagtttctctgcagcaaagccaccaccccggtcaacatcgacagccaggcccagctagcagacgacgtcctccgcgcacctcacccagacatgttcaaggagcagcagctgcagatcttcaatctcatgaagtttgatagctacactcgctttctgaagtccccgctgtaccaggaatgcatcctggcggaagtggagggccgtgcactcccggactcgcagcaggtccccagcagcccggcttccaagcacagcctcggttcagaccactccagtgtgtccacgccaaaaaagttaagtggaaaatcaaaatccggccgatccctgaatgaagagctgggggatgaggacagcgagaagaagcggaaaggcgcgtttttctcgtggtcgcggaccaggagcaccgggaggtcccagaaaaagagggagcacggggaccacgcagacgacgccctgcatgccaatggaggcctgtgtcgccgagagtcgcagggctctgtgtcctctgcggggagcctggacctgtcggaggcctgcaggactttggcacccgagaaggacaaggccaccaagcactgctgcattcatctcccggatgggacatcctgcgtggtggctgtcaaggcgggcttctccatcaaagacatcctgtccggactctgtgagcggcatggcatcaacggggcggccgcggacctcttcctggtgggcggggacaagcctctggtgctgcaccaagacagtagcatcttggagtcaagggacctgcgcctagaaaagcgcaccttgtttcggctggatcttgttccgattaaccggtcagtgggactcaaggccaagcccaccaagcccgtcacggaggtgctgcggcccgtggtggccagatacggcctggacctcagtggcctgctggtgaggctgagtggagagaaggagcccctggaccttggcgcccctatatcgagtctggacggacagcgggttgtcttggaggagaaggatccttccagaggaaaggcatccgcagataaacagaaaggtgtgccagtgaaacagaacacagctgtaaattccagctccagaaaccactcggctacgggagaggaaagaacactaggcaagtctaattctattaaaataaaaggagaaaatggaaaaaatgctagggatccccggctttcaaagagagaagaatctattgcaaagattgggaaaaaaaaatatcagaaaattaatttggacgaagcagaggagttttttgagcttatttccaaagctcagagcaacagagcagatgaccaacgtgggctgctaaggaaggaagacctggtgttgccagagttcctccgtttacctcctggttccacagaactcaccctccccactccagctgctgtggccaagggctttagcaagagaagcgccacaggcaacggccgggagagcgcctcccagcctggcgagcagtgggagccagtccaggagagcagcgacagtccgtccaccagcccgggctcagcctccagcccccctggacctcctgggacgaccccccccgggcagaagtctcccagcgggcccttctgcactccccagtcccccgtctccctcgcgcaggagggcaccgcccagatctggaagaggcagtctcaggaagtggaggccgggggcatccagacggtggaggatgagcacgtggccgagctgaccctgatgggggagggggacatcagcagccccaacagcaccttgctgccgccgccctccaccccccaggaagtgccaggaccttccagaccaggaagtgggacccatggcagccgagacctcccagtcaacagaatcatcgatgtggatcttgtaactggctcggcgcccgggcgggatggtggcatagcgggggcacaggctggccctgggaggtcgcaggccagtggtgggcctcctacatcagacctccctggcttgggccccgtcccgggtgagcctgctaagcccaagaccagcgctcaccacgccaccttcgtctgagctgccctggcctggccaactctcctgtggacatgtcggggtggggcagcccaggtggattctgtgggcctcaggggggccaccctggccaccacaccctcaggagcccagccaggagggcagggggtgacctcgctggaggcactggccccggacattcgccatgctggccatggggctccctggccctggcctcctgctgcccaataaagcatttctgaaaaaaaaaaaaaaa

SEQ ID NO: 562 - protein, 789 aa, Homo sapiens
MSLSLFFQSATVSDGELTGADLKDCVSNNSLSSNASLPSVQSCRRLRERRVASWAVSFERLLQDPVGVRYFSDFLRKEFSEENILFWQACEYFNHVPAHDKKELSYRAREIFSKFLCSKATTPVNIDSQAQLADDVLRAPHPDMFKEQQLQIFNLMKFDSYTRFLKSPLYQECILAEVEGRALPDSQQVPSSPASKHSLGSDHSSVSTPKKLSGKSKSGRSLNEELGDEDSEKKRKGAFFSWSRTRSTGRSQKKREHGDHADDALHANGGLCRRESQGSVSSAGSLDLSEACRTLAPEKDKATKHCCIHLPDGTSCVVAVKAGFSIKDILSGLCERHGINGAAADLFLVGGDKPLVLHQDSSILESRDLRLEKRTLFRLDLVPINRSVGLKAKPTKPVTEVLRPVVARYGLDLSGLLVRLSGEKEPLDLGAPISSLDGQRVVLEEKDPSRGKASADKQKGVPVKQNTAVNSSSRNHSATGEERTLGKSNSIKIKGENGKNARDPRLSKREESIAKIGKKKYQKINLDEAEEFFELISKAQSNRADDQRGLLRKEDLVLPEFLRLPPGSTELTLPTPAAVAKGFSKRSATGNGRESASQPGEQWEPVQESSDSPSTSPGSASSPPGPPGTTPPGQKSPSGPFCTPQSPVSLAQEGTAQIWKRQSQEVEAGGIQTVEDEHVAELTLMGEGDISSPNSTLLPPPSTPQEVPGPSRPGSGTHGSRDLPVNRIIDVDLVTGSAPGRDGGIAGAQAGPGRSQASGGPPTSDLPGLGPVPGEPAKPKTSAHHATFV

SEQ ID NO: 563 - DNA, 2349 bp, Homo sapiens
gcggcgggcggcagcatgtcggtggcggggctgaagaagcagttctacaaggcgagccagctggtcagtgagaaggtcggaggggccgaggggaccaagctggatgatgacttcaaagagatggagaagaaggtggatgtcaccagcaaggcggtgacagaagtgctggccaggaccatcgagtacctgcagcccaacccagcctcgcgggctaagctgaccatgctcaacacggtgtccaagatccggggccaggtgaagaaccccggctacccgcagtcggaggggcttctgggcgagtgcatgatccgccacgggaaggagctgggcggcgagtccaactttggtgacgcattgctggatgccggcgagtccatgaagcgcctggcagaggtgaaggactccctggacatcgaggtcaagcagaacttcattgaccccctccagaacctgtgcgagaaagacctgaaggagatccagcaccacctgaagaaactggagggccgccgcctggactttgactacaagaagaagcggcagggcaagatccccgatgaggagctacgccaggcgctggagaagttcgaggagtccaaggaggtggcagaaaccagcatgcacaacctcctggagactgacatcgagcaggtgagtcagctctcggccctggtggatgcacagctggactaccaccggcaggccgtgcagatcctggacgagctggcggagaagctcaagcgcaggatgcgggaagcttcctcacgccctaagcgggagtataagcccaagccccgggagccctttgaccttggagagcctgagcagtccaacgggggcttcccctgcaccacagcccccaagatcgcagcttcatcgtctttccgatcttccgacaagcccatccggacccctagccggagcatgccgcccctggaccagccgagctgcaaggcgctgtacgacttcgagcccgagaacgacggggagctgggcttccatgagggcgacgtcatcacgctgaccaaccagatcgatgagaactggtacgagggcatgctggacggccagtcgggcttcttcccgctcagctacgtggaggtgcttgtgcccctgccgcagtgactcacccgtgtccccgccccgcccctccgtccacactggccggcaccccctgctgggtctcctgcattccacggagcccctgctgccagggcggtgtctgagcctgccggcgccacctgggccccggcccttgaggtactccctgagcaggaccccacacttgggtgggggggcttatctgggtgggtggggatgcctgtttacactagcgctgactcccaacggtgacggctcccttccccactccatggcgccagcctcctcccccgctccccaacttctcgcccagctggccgaggcggggcaacactaaggtgctcttagaaacactaatgttcctctggggcagcccccacctccgtcctgacccgacgggggcccggcccactgcctaccctcgagtcccgcagccttaacaggatgggatcgagggtccccatggggtggctcagagataggaccctggttttaaatccctcccagcctggtgctggtgatgggccctggccctactccagggccaatgcacccccgcctcacacacgcactccttctcctcaaggccagggcagagggcctcaccgcctcccgggcctgctgtcagcttgcagcccggggacagaggccagctgggatctgcctgaggacagagaacatggtctcctgcagggccctgcctcccaagccccgccctcagaaagccaagtaccttttcagctttttaactgcccccatcccaacccagggaggcctgtgtcactctggcacaagctgccaccaccagccacccacacccaccccagcacacctcacacgggaccacagccgcgctgccgagggccaagcacaaaggttccagtgagcgcatgtcccagccctggtggccaggctccccttgctgagccgctgccacttcaccctgtgggaagtggccccagccatctcctctagaccaaggcaggcagccccgacatctgcttcctctatcgcccaatgcaaaatcgatgaaatggggagttctctgggccaggccacattcacattcccctccctctgtggtccagtgaagctccggaccccaggctctgctctgccctgccctgcacccccctcgtcagaagtacatgaggggcgcagagatgagcacacagctttgggcacggtccagggcaaactgaaatgtacgcctgaattttgtaaacagaagtattaaatgtctctttctac

SEQ ID NO: 564 - protein, 368 aa, Homo sapiens
MSVAGLKKQFYKASQLVSEKVGGAEGTKLDDDFKEMEKKVDVTSKAVTEVLARTIEYLQPNPASRAKLTMLNTVSKIRGQVKNPGYPQSEGLLGECMIRHGKELGGESNFGDALLDAGESMKRLAEVKDSLDIEVKQNFIDPLQNLCEKDLKEIQHHLKKLEGRRLDFDYKKKRQGKIPDEELRQALEKFEESKEVAETSMHNLLETDIEQVSQLSALVDAQLDYHRQAVQILDELAEKLKRRMREASSRPKREYKPKPREPFDLGEPEQSNGGFPCTTAPKIAASSSFRSSDKPIRTPSRSMPPLDQPSCKALYDFEPENDGELGFHEGDVITLTNQIDENWYEGMLDGQSGFFPLSYVEVLVPLPQ

SEQ ID NO: 565 - DNA, 3045 bp, Homo sapiens
aattcccttgaggtggtttcacatccacatccagttgtccctaaaatggagaaagaactggtgccagaccaggcagtaatatcagacagtactttctctctggcaaacagtccaggcagtgaatcagtaaccaaggatgacgcactttcttttgtcccctcccagaaagaaaagggaacagcaactcctgaactacatacagctacagattatagagatggcccagatggaaattcgaatgagcctgatacgcggccactagaagacagggcagtaggcctgtccacatcctccactgctgcagagcttcagcacgggatggggaataccagtctcacaggacttggtggagagcatgagggtcccgcccctccagcaatcccagaagctctgaatatcaaggggaacactgactcttccctgcaaagtgtgggtaaggccactttggctttagattcagttttgactgaagaaggaaaacttctggtggtttcagaaagctctgcagctcaggaacaagataaggataaagcggtgacctgttcctctattaaggaaaatgctctctcttcaggaactttgcaggaagagcagagaacaccacctcctggacaagatactcaacaatttcatgaaaaatcaatctcagctgactgtgccaaggacaaagcacttcagctaagtaattcaccgggtgcatcctctgcctttcttaaggcagaaactgaacataacaaggaagtggccccacaagtctcactgctgactcaaggtggggctgcccagagcctggtgccaccaggagcaagtctggccacagagtcaaggcaggaagccttgggggcagagcacaacagctccgctctgttgccatgtctgttgccagatgggtctgatgggtccgatgctcttaactgcagtcagccttctcctctggatgttggagtgaagaacactcaatcccagggaaaaactagtgcctgtgaggtgagtggagatgtgacggtggatgttacaggggttaatgctctacaaggtatggctgagcccagaagagagaatatatcacacaacacccaagacatcctgattccaaacgtcttgttgagccaagagaagaatgccgttctaggtttgccagtggctctacaggacaaagctgtgactgacccacagggagttggaaccccagagatgatacctcttgattgggagaaagggaagctggagggagcagaccacagctgtaccatgggtgacgctgaggaagcccaaatagacgatgaagcacatcctgtcctactgcagcctgttgccaaggagctccccacagacatggagctctcagcccatgatgatggggccccagctggtgtgagggaagtcatgcgagccccgccttcaggcagggaaaggagcactccctctctaccttgcatggtctctgcccaggacgcacctctgcctaagggggcagacttgatagaggaggctgccagccgtatagtggatgctgtcatcgaacaagtcaaggccgctggagcactgcttactgagggggaggcctgtcacatgtcactgtccagccctgagttgggtcctctcactaaaggactagagagtgcttttacagaaaaagtgagtactttcccacctggggagagcctaccaatgggcagtactcctgaggaagccacggggagccttgcaggatgttttgctggaagggaggagccagagaagatcattttacctgtccaggggcctgagccagcagcagaaatgccagacgtgaaagctgaagatgaagtggattttagagcaagttcaatttctgaagaagtggctgtagggagcatagctgctacactgaagatgaagcaaggcccaatgacccaggcgataaaccgagaaaactggtgtacaatagagccatgccctgatgcagcatctcttctggcttccaagcagagcccagaatgtgagaacttcctggatgttggactgggcagagagtgtacctcaaaacaaggtgtacttaaaagagaatctgggagtgattctgacctctttcactcacccagtgatgacatggacagcatcatcttcccaaagccagaggaagagcatttggcctgtgatatcaccggatccagttcatccaccgatgacacggcttcactggaccgacattcttctcatggcagtgatgtgtctctctcccagattttaaagccaaacaggtcaagagatcggcaaagccttgatggattctacagccatgggatgggagctgagggtcgagaaagtgagagtgagcctgctgacccaggcgacgtggaggaggaggagatggacagtatcactgaagtgcctgcaaactgctctgtcctaaggagctccatgcgctctctttctcccttccggaggcacagctgggggcctgggaaaaatgcagccagcgatgcagaaatgaaccaccggagttcaatgcgagttcttggggatgttgtcaggagacctcccattcataggagaagtttcagtctagaaggcttgacaggaggagctggtgtcggaaacaagccatcctcatctctagaagtaagctctgcaaatgccgaagagctcagacacccattcagtggtgaggaacgggttgactctttggtgtcactttcagaagaggatctggagtcagaccagagagaacataggatgtttgatcagcagatatgtcacagatctaagcagcagggatttaattactgtacatcagccatttcctctccattgacaaaatccatctcattaatgacaatcagccatcctggattggacaattcacggcccttccacagtaccttccacaataccagtgctaatctgactgagagtataacagaagagaactataatttcctgccacatagcccctccaagaaagattctgaatggaagagtggaacaaaagtcagtcgtacattcagctacatcaagaataaaatgtctagcagcaagaagagcaaagaaaagaaaaaaaag

SEQ ID NO: 566 - protein, 1015 aa, Homo sapiens
NSLEVVSHPHPVVPKMEKELVPDQAVISDSTFSLANSPGSESVTKDDALSFVPSQKEKGTATPELHTATDYRDGPDGNSNEPDTRPLEDRAVGLSTSSTAAELQHGMGNTSLTGLGGEHEGPAPPAIPEALNIKGNTDSSLQSVGKATLALDSVLTEEGKLLVVSESSAAQEQDKDKAVTCSSIKENALSSGTLQEEQRTPPPGQDTQQFHEKSISADCAKDKALQLSNSPGASSAFLKAETEHNKEVAPQVSLLTQGGAAQSLVPPGASLATESRQEALGAEHNSSALLPCLLPDGSDGSDALNCSQPSPLDVGVKNTQSQGKTSACEVSGDVTVDVTGVNALQGMAEPRRENISHNTQDILIPNVLLSQEKNAVLGLPVALQDKAVTDPQGVGTPEMIPLDWEKGKLEGADHSCTMGDAEEAQIDDEAHPVLLQPVAKELPTDMELSAHDDGAPAGVREVMRAPPSGRERSTPSLPCMVSAQDAPLPKGADLIEEAASRIVDAVIEQVKAAGALLTEGEACHMSLSSPELGPLTKGLESAFTEKVSTFPPGESLPMGSTPEEATGSLAGCFAGREEPEKIILPVQGPEPAAEMPDVKAEDEVDFRASSISEEVAVGSIAATLKMKQGPMTQAINRENWCTIEPCPDAASLLASKQSPECENFLDVGLGRECTSKQGVLKRESGSDSDLFHSPSDDMDSIIFPKPEEEHLACDITGSSSSTDDTASLDRHSSHGSDVSLSQILKPNRSRDRQSLDGFYSHGMGAEGRESESEPADPGDVEEEEMDSITEVPANCSVLRSSMRSLSPFRRHSWGPGKNAASDAEMNHRSSMRVLGDVVRRPPIHRRSFSLEGLTGGAGVGNKPSSSLEVSSANAEELRHPFSGEERVDSLVSLSEEDLESDQREHRMFDQQICHRSKQQGFNYCTSAISSPLTKSISLMTISHPGLDNSRPFHSTFHNTSANLTESITEENYNFLPHSPSKKDSEWKSGTKVSRTFSYIKNKMSSSKKSKEKKKK

SEQ ID NO: 567 - DNA, 2443 bp, Homo sapiens
caccgccaccgcctggtccaggcccaagcccaggccctgcgcggagcggagcggcgcggcgtccacccgggcccagccagccggcgcggcgggggcgggtccaggatcttcggcggatcttcggcggatcttcggcggatcttccattctcagggcgggagccggagtccgggcgcccgggatcgggctgggcccgcgcccatggcaagcgcggcctgcccgggccctggggaccctgccatgtgaggcaggcccgggctgggggcccggccatggccggggaacggcccccactgcggggccctgggcccgggcctggagaggtgccgggggaggggcccccggggccggggggcacgggcggaggcccgggccggggccgcccctcctcctaccgggttctccgcagcgccgtgtctagcctggcgcgtgtggacgattttcactgcgcggagaagatcggggccggcttcttctctgaggtctacaaggttcggcaccgacagtcagggcaagtcatggtgctgaagatgaacaagctccccagtaaccggggcaacacactacgggaagtgcagctgatgaaccggctcaggcaccccaacatcctaaggttcatgggagtctgtgtgcaccagggacagctgcacgctcttacagagtatatgaatggggggacattggaacagctgctcagctcccctgaacccctatcctggccggtcaggctccacctggccctggacattgcccgaggcctgcggtacctgcactccaaaggtgtatttcaccgcgacctcacatccaagaactgtctagtccgacgggaagatcgaggcttcaccgctgtcgtgggtgacttcgggctggccgaaaagattcctgtgtatagggagggggcaaggaaggagccattggccgtggtgggctccccatactggatggctccagaggtgttacggggtgagctgtatgatgagaaggctgatgtctttgccttcgggattgtcctctgtgagctcatcgcccgagtacctgcagaccctgactacctaccacgcactgaggactttggcctggatgtgcctgctttccgaactctggtgggggatgactgcccactgcctttcttgctcctggccatccactgctgcaacctggaacccagcacccgtgcccccttcaccgaaattacccagcacctggaatggatcctggagcagctgcctgagccagccccactcaccaggaccgccctgacacacaatcagggctctgttgcaagagggggtccctctgccacgcttcccaggccagatccccggctttcccgaagccggtcagacctcttcctgcccccatcaccagaatcaccccccaactggggggacaatctgactcgagtcaaccccttctcactacgggaagacctcaggggtggcaagatcaagctcttagacacacccagcaagccagtcctgcctcttgtgccaccatcaccattcccatccactcagctgcccttggtgaccactccggagaccctggtccagcctgggacacctgcccgccgctgccgctcactaccctcatcccccgagctcccccgccgtatggagacagcactgccaggtcctggccctcccgctgtgggcccctcggctgaagagaagatggagtgcgagggcagcagccctgagccggaacctccagggccagcgccccagctgcctctggctgtggccacagacaacttcatcagcacctgttcctcggcctcccaaccctggtcccctagatcaggacccgtcctcaataacaatcccccagctgtggtggtgaactccccacaaggctgggctggggagccctggaaccgggcccagcatagcctgccccgggcggcagccctggagcggacagaaccctcgccacccccttcagctccccgggagcccgatgaggggctgccctgtcctggctgctgcctcggccccttcagctttggcttcctgtccatgtgcccccgccccacaccagctgttgcccgctaccgcaacctgaactgtgaggcgggcagtctcctctgccaccgagggcaccacgccaagccacccacacccagcctgcagctgcctggggcacgctcttagcagtggagcccgtggtctcaggcctccaactttggccttcaggacaccctgtaagaacagagcacacttgctggacagtgccagttccagatgggctgaccggctcttctccccgtgtaggggagccccagcatggactcaagggacagagcacttccagtcgaccccccggctcgcgttcccgtggggatcactgaaccagacacagcattgctgacacatgagactaacacgtgcaattatttaaaaagatttcaataaaactgcctggctggctccgggccgcccct

SEQ ID NO: 568 - protein, 626 aa, Homo sapiens
MAGERPPLRGPGPGPGEVPGEGPPGPGGTGGGPGRGRPSSYRVLRSAVSSLARVDDFHCAEKIGAGFFSEVYKVRHRQSGQVMVLKMNKLPSNRGNTLREVQLMNRLRHPNILRFMGVCVHQGQLHALTEYMNGGTLEQLLSSPEPLSWPVRLHLALDIARGLRYLHSKGVFHRDLTSKNCLVRREDRGFTAVVGDFGLAEKIPVYREGARKEPLAVVGSPYWMAPEVLRGELYDEKADVFAFGIVLCELIARVPADPDYLPRTEDFGLDVPAFRTLVGDDCPLPFLLLAIHCCNLEPSTRAPFTEITQHLEWILEQLPEPAPLTRTALTHNQGSVARGGPSATLPRPDPRLSRSRSDLFLPPSPESPPNWGDNLTRVNPFSLREDLRGGKIKLLDTPSKPVLPLVPPSPFPSTQLPLVTTPETLVQPGTPARRCRSLPSSPELPRRMETALPGPGPPAVGPSAEEKMECEGSSPEPEPPGPAPQLPLAVATDNFISTCSSASQPWSPRSGPVLNNNPPAVVVNSPQGWAGEPWNRAQHSLPRAAALERTEPSPPPSAPREPDEGLPCPGCCLGPFSFGFLSMCPRPTPAVARYRNLNCEAGSLLCHRGHHAKPPTPSLQLPGARS

SEQ ID NO: 569 - DNA, 937 bp, Homo sapiens
cgcggccccagggctcacttggcgctgagaacgcgggtgcagcgtgtgatcgtccgtgcgtctagcctttgcccacgcagctttcagtcatggcctccggtaacgcgcgcatcggaaagccagcccctgacttcaaggccacagcggtggttgatggcgccttcaaagaggtgaagctgtcggactacaaagggaagtacgtggtcctctttttctaccctctggacttcacttttgtgtgccccaccgagatcatcgcgttcacaaccgtgaagaggacttccgcaaagctgggctgtgaagtgctgggcgtctcggtggactctcagttcacccacctggcttggatcaacaccccccggaaagagggaggcttgggccccttgaacatccccctgcttgctgacgtgaccagacgcttgtctgaggattacggcgtgctgaaaaacgatgagggcattgcttacaggggcctctttatcatcgatggcaagggtgtccttcgccagatcactgttaatgatttgcctgtgggacgctccgtggatgaggctctgcggctggtccaggccttccagtacacagacgagcatggggaagtttgtccggctgcttggaagcctggacgtgacacgattaagccgaacgtggatgacagcaaggaatatttctccaaacacaattaggctggctaacggatagtgagcttgtgcccctgcctaggtgcctgtgctgggtgtccacctgtgcccccacctgggtgccctatgctgacccaggaaaggccagacctgcccctccaaaatccacagtatgggaccctggagggctagcaaggccttctcatgcctccacctagaagctgaatagtgacgccctcccccaagcccacccagccgcacacaggcctagaggtaaccaataaagtattagggcc

SEQ ID NO: 570 - protein, 198 aa, Homo sapiens
MASGNARIGKPAPDFKATAVVDGAFKEVKLSDYKGKYVVLFFYPLDFTFVCPTEIIAFTTVKRTSAKLGCEVLGVSVDSQFTHLAWINTPRKEGGLGPLNIPLLADVTRRLSEDYGVLKNDEGIAYRGLFIIDGKGVLRQITVNDLPVGRSVDEALRLVQAFQYTDEHGEVCPAAWKPGRDTIKPNVDDSKEYFSKHN

SEQ ID NO: 571 - DNA, 2406 bp, Homo sapiens
atgggagactcccacgtggacaccagctccaccgtgtccgaggcggtggccgaagaagtatctcttttcagcatgacggacatgattctgttttcgctcatcgtgggtctcctaacctactggttcctcttcagaaagaaaaaagaagaagtccccgagttcaccaaaattcagacattgacctcctctgtcagagagagcagctttgtggaaaagatgaagaaaacggggaggaacatcatcgtgttctacggctcccagacggggactgcagaggagtttgccaaccgcctgtccaaggacgcccaccgctacgggatgcgaggcatgtcagcggaccctgaggagtatgacctggccgacctgagcagcctgccagagatcgacaacgccctggtggttttctgcatggccacctacggtgagggagaccccaccgacaatgcccaggacttctacgactggctgcaggagacagacgtggatctctctggggtcaagttcgcggtgtttggtcttgggaacaagacctacgagcacttcaatgccatgggcaagtacgtggacaagcggctggagcagctcggcgcccagcgcatctttgagctggggttgggcgacgacgatgggaacttggaggaggacttcatcacctggcgagagcagttctggccggccgtgtgtgaacactttggggtggaagccactggcgaggagtccagcattcgccagtacgagcttgtggtccacaccgacatagatgcggccaaggtgtacatgggggagatgggccggctgaagagctacgagaaccagaagcccccctttgatgccaagaatccgttcctggctgcagtcaccaccaaccggaagctgaaccagggaaccgagcgccacctcatgcacctggaattggacatctcggactccaaaatcaggtatgaatctggggaccacgtggctgtgtacccagccaacgactctgctctcgtcaaccagctgggcaaaatcctgggtgccgacctggacgtcgtcatgtccctgaacaacctggatgaggagtccaacaagaagcacccattcccgtgccctacgtcctaccgcacggccctcacctactacctggacatcaccaacccgccgcgtaccaacgtgctgtacgagctggcgcagtacgcctcggagccctcggagcaggagctgctgcgcaagatggcctcctcctccggcgagggcaaggagctgtacctgagctgggtggtggaggcccggaggcacatcctggccatcctgcaggactgcccgtccctgcggccccccatcgaccacctgtgtgagctgctgccgcgcctgcaggcccgctactactccatcgcctcatcctccaaggtccaccccaactctgtgcacatctgtgcggtggttgtggagtacgagaccaaggccggccgcatcaacaagggcgtggccaccaactggctgcgggccaaggagcctgccggggagaacggcggccgtgcgctggtgcccatgttcgtgcgcaagtcccagttccgcctgcccttcaaggccaccacgcctgtcatcatggtgggccccggcaccggggtggcacccttcataggcttcatccaggagcgggcctggctgcgacagcagggcaaggaggtgggggagacgctgctgtactacggctgccgccgctcggatgaggactacctgtaccgggaggagctggcgcagttccacagggacggtgcgctcacccagctcaacgtggccttctcccgggagcagtcccacaaggtctacgtccagcacctgctaaagcaagaccgagagcacctgtggaagttgatcgaaggcggtgcccacatctacgtctgtggggatgcacggaacatggccagggatgtgcagaacaccttctacgacatcgtggctgagctcggggccatggagcacgcgcaggcggtggactacatcaagaaactgatgaccaagggccgctactccctggacgtgtggagctaggggcctgcctgccccacccaccccacagactccggcctgtaatcagctctcctggctccctcccgtagtctcctgggtgtgtttggcttggccttggcatgggcgcaggcccagtgacaaagactcctctgggcctggggtgcatcctcctcagcccccaggccaggtgaggtccaccggcccctggcagcacagcccagggcctgcatgggggcaccgggctccatgcctctggagcctctggccctcggtggctgcacagaagggctctttctctctgctgagctggcccagcccctccacgtgatttccagtgagtgtaaataattttaaataacctctggcccttggaataaagttctgttttctgta

SEQ ID NO: 572 - protein, 677 aa, Homo sapiens
MGDSHVDTSSTVSEAVAEEVSLFSMTDMILFSLIVGLLTYWFLFRKKKEEVPEFTKIQTLTSSVRESSFVEKMKKTGRNIIVFYGSQTGTAEEFANRLSKDAHRYGMRGMSADPEEYDLADLSSLPEIDNALVVFCMATYGEGDPTDNAQDFYDWLQETDVDLSGVKFAVFGLGNKTYEHFNAMGKYVDKRLEQLGAQRIFELGLGDDDGNLEEDFITWREQFWPAVCEHFGVEATGEESSIRQYELVVHTDIDAAKVYMGEMGRLKSYENQKPPFDAKNPFLAAVTTNRKLNQGTERHLMHLELDISDSKIRYESGDHVAVYPANDSALVNQLGKILGADLDVVMSLNNLDEESNKKHPFPCPTSYRTALTYYLDITNPPRTNVLYELAQYASEPSEQELLRKMASSSGEGKELYLSWVVEARRHILAILQDCPSLRPPIDHLCELLPRLQARYYSIASSSKVHPNSVHICAVVVEYETKAGRINKGVATNWLRAKEPAGENGGRALVPMFVRKSQFRLPFKATTPVIMVGPGTGVAPFIGFIQERAWLRQQGKEVGETLLYYGCRRSDEDYLYREELAQFHRDGALTQLNVAFSREQSHKVYVQHLLKQDREHLWKLIEGGAHIYVCGDARNMARDVQNTFYDIVAELGAMEHAQAVDYIKKLMTKGRYSLDVWS

SEQ ID NO: 573 - DNA, 3119 bp, Homo sapiens
gaagctccacaccagccattacaaccctgccaatctcaagcacctgcctctacagttggtacagatggcattgtcccagtctgttcccttctcggccacagagcttctcctggcctctgccatcttctgcctggtattctgggtgctcaagggtttgaggcctcgggtccccaaaggcctgaaaagtccaccagagccatggggctggcccttgctcgggcatgtgctgaccctggggaagaacccgcacctggcactgtcaaggatgagccagcgctacggggacgtcctgcagatccgcattggctccacgcccgtgctggtgctgagccgcctggacaccatccggcaggccctggtgcggcagggcgacgatttcaagggccggcctgacctctacacctccaccctcatcactgatggccagagcttgaccttcagcacagactctggaccggtgtgggctgcccgccggcgcctggcccagaatgccctcaacaccttctccatcgcctctgacccagcttcctcatcctcctgctacctggaggagcatgtgagcaaggaggctaaggccctgatcagcaggttgcaggagctgatggcagggcctgggcacttcgacccttacaatcaggtggtggtgtcagtggccaacgtcattggtgccatgtgcttcggacagcacttccctgagagtagcgatgagatgctcagcctcgtgaagaacactcatgagttcgtggagactgcctcctccgggaaccccctggacttcttccccatccttcgctacctgcctaaccctgccctgcagaggttcaaggccttcaaccagaggttcctgtggttcctgcagaaaacagtccaggagcactatcaggactttgacaagaacagtgtccgggacatcacgggtgccctgttcaagcacagcaagaaggggcctagagccagcggcaacctcatcccacaggagaagattgtcaaccttgtcaatgacatctttggagcaggatttgacacagtcaccacagccatctcctggagcctcatgtaccttgtgaccaagcctgagatacagaggaagatccagaaggagctggacactgtgattggcagggagcggcggccccggctctctgacagaccccagctgccctacttggaggccttcatcctggagaccttccgacactcctccttcttgcccttcaccatcccccacagcacaacaagggacacaacgctgaatggcttctacatccccaagaaatgctgtgtcttcgtaaaccagtggcaggtcaaccatgacccagagctgtgggaggacccctctgagttccggcctgagcggttcctcaccgccgatggcactgccattaacaagcccttgagtgagaagatgatgctgtttggcatgggcaagcgccggtgtatcggggaagtcctggccaagtgggagatcttcctcttcctggccatcctgctacagcaactggagttcagcgtgccgccgggcgtgaaagtcgacctgacccccatctacgggctgaccatgaagcacgcccgctgtgaacatgtccaggcgcggcgcttctccatcaattgaagaagacaccaccattctgaggccagggagcgagtgggggccagccacggggactcagcccttgtttctcttcctttctttttttaaaaaatagcagctttagccaagtgcagggcctgtaatcccagcattttgggaggccggggttggaggatcatttgagcccaggaattggaaagcagcctggccaacatagtgggaccctgtctctacaaaaaaaaaatttgccaagagcctgagtgacagagcaagaccccatctcaaaaaaaaaacaaacaaacaaaaaaaaaaccatatatatacatatatatatagcagctttatggagatataattcttatgccatataattcaccttcttttttttttttgtctgagacagaatctcagtctgtcacccaggttggagtgcagtggcgtgatctcagctcactgcaacctccacctcgcaggttcaagcaatcctcccacttcagcctcccaagcacctgggattacaagcatgagtcactacgcctggctgatttttgtagttttagtggagatggggtttcaccatgttggccaggcttgtctcgaactcctgaccccaagttatccacctgccttggcttcccaaagtcctgggattacaggtgtgagccaccacatccagcctaacttacattcttaaagtgtcgaatgacttctagtgtagaattgtgcaaccatcaccagaattaattttattattcttattatttttgagacagagtcttactctgttgccaggctggagtgcagtggcgcgatctcagctcactacaacctccgcctcccatgttcaagcgattctcctgcctcagcctcccgagtagctgggactatagatgcgccaccatggccagctaatttttgtatttttagtagagacgaggtttcactgtgttggccaggatggtctccatctcttgacctcgtgatccacccgcctcagcctcccaaagtgctgggattaacaggtatgaaccaccgcgcccagcctttttgtttttttttttttgagacagagtcttcctctgtctcctaagctggagtgcagtggcatcatctcagctcactgcaacctctgcctcccaggttcaagtgcttctccagcctcggcctcccaagtagctgagactacaggcacacaccaccacgcctggctaatttttgtatttttggtagagacgggtttcaccatgttggtcagactagtctcaaactcctgacctcaagtgatctgcccgcctcgacctctctcaaaatgctggcattacaggtgtgagccacggtgcccggcccacaattaattttagaacattttcatcacccctaaaagaaaccctgcacccattagcagtccctccacatttccccctagcctgcctcccctgcctcaccagccctggcaactgctaatctactttctgtgtctatggatttgccttctctaaacatttcatataaatggaattacacaatg

SEQ ID NO: 574 - protein, 515 aa, Homo sapiens
MALSQSVPFSATELLLASAIFCLVFWVLKGLRPRVPKGLKSPPEPWGWPLLGHVLTLGKNPHLALSRMSQRYGDVLQIRIGSTPVLVLSRLDTIRQALVRQGDDFKGRPDLYTSTLITDGQSLTFSTDSGPVWAARRRLAQNALNTFSIASDPASSSSCYLEEHVSKEAKALISRLQELMAGPGHFDPYNQVVVSVANVIGAMCFGQHFPESSDEMLSLVKNTHEFVETASSGNPLDFFPILRYLPNPALQRFKAFNQRFLWFLQKTVQEHYQDFDKNSVRDITGALFKHSKKGPRASGNLIPQEKIVNLVNDIFGAGFDTVTTAISWSLMYLVTKPEIQRKIQKELDTVIGRERRPRLSDRPQLPYLEAFILETFRHSSFLPFTIPHSTTRDTTLNGFYIPKKCCVFVNQWQVNHDPELWEDPSEFRPERFLTADGTAINKPLSEKMMLFGMGKRRCIGEVLAKWEIFLFLAILLQQLEFSVPPGVKVDLTPIYGLTMKHARCEHVQARRFSIN

SEQ ID NO: 575 - DNA, 1258 bp, Homo sapiens
tcaggccccgcccgccctgccctcccctcccgatcccggagccatgtggcccctggccctagtgatcgcctccctgaccttggccttgtcaggaggtgtctcccaggagtcttccaaggttctcaacaccaatgggaccagtgggtttctcccaggtggctacacctgcttcccccactctcagccctggcaggctgccctactagtgcaagggcggctactctgtgggggagtcctggtccaccccaaatgggtcctcactgccgcacactgtctaaaggaggggctcaaagtttacctaggcaagcacgccctagggcgtgtggaagctggtgagcaggtgagggaagttgtccactctatcccccaccctgaataccggagaagccccacccacctgaaccacgaccatgacatcatgcttctggagctgcagtccccggtccagctcacaggctacatccaaaccctgcccctttcccacaacaaccgcctaacccctggcaccacctgtcgggtgtctggctggggcaccaccaccagcccccaggtgaattaccccaaaactctacaatgtgccaacatccaacttcgctcagatgaggagtgtcgtcaagtctacccaggaaagatcactgacaacatgttgtgtgccggcacaaaagagggtggcaaagactcctgtgagggtgactctgggggccccctggtctgtaacagaacactgtatggcatcgtctcctggggagacttcccatgtgggcaacctgaccggcctggtgtctacacccgtgtctcaagatacgtcctgtggatccgtgaaacaatccgaaaatatgaaacccagcagcaaaaatggttgaagggcccacaataaaagttgagaaatgtaccggcttccatcctgtcaccatgacttcctcacatggtctgcttagcccttctctgctccttattcccagtgttccatttgaaccagtgatccatgtcctgaaaaatgctcaatctcagctaacattccatgtttcagaagcattcaggcactgccaggcttgcagtctcccagatgttgcatccctgaaacatctcaacaacctgaatgtcccaacccagacaatggcccaggtctctcaacttcatcagtgtggcttctatgagcccagatcaccacctgaacgttctgtctgtggcacattcttaaatatttccatcagcccatctcaacaatatatgtcctataaatggaccatccttgaca

SEQ ID NO: 576 - protein, 277 aa, Homo sapiens
MWPLALVIASLTLALSGGVSQESSKVLNTNGTSGFLPGGYTCFPHSQPWQAALLVQGRLLCGGVLVHPKWVLTAAHCLKEGLKVYLGKHALGRVEAGEQVREVVHSIPHPEYRRSPTHLNHDHDIMLLELQSPVQLTGYIQTLPLSHNNRLTPGTTCRVSGWGTTTSPQVNYPKTLQCANIQLRSDEECRQVYPGKITDNMLCAGTKEGGKDSCEGDSGGPLVCNRTLYGIVSWGDFPCGQPDRPGVYTRVSRYVLWIRETIRKYETQQQKWLKGPQ

SEQ ID NO: 577 - DNA, 1400 bp, Homo sapiens
gcatcccggacctgcggcgaccgtcgtacaccatgggcctccacctccgcccctaccgtgtggggctgctcccggatggcctcctgttcctcttgctgctgctaatgctgctcgcggacccagcgctcccggccggacgtcaccccccagtggtgctggtccctggtgatttgggtaaccaactggaagccaagctggacaagccgacagtggtgcactacctctgctccaagaagaccgaaagctacttcacaatctggctgaacctggaactgctgctgcctgtcatcattgactgctggattgacaatatcaggctggtttacaacaaaacatccagggccacccagtttcctgatggtgtggatgtacgtgtccctggctttgggaagaccttctcactggagttcctggaccccagcaaaagcagcgtgggttcctatttccacaccatggtggagagccttgtgggctggggctacacacggggtgaggatgtccgaggggctccctatgactggcgccgagccccaaatgaaaacgggccctacttcctggccctccgcgagatgatcgaggagatgtaccagctgtatgggggccccgtggtgctggttgcccacagtatgggcaacatgtacacgctctactttctgcagcggcagccgcaggcctggaaggacaagtatatccgggccttcgtgtcactgggtgcgccctgggggggcgtggccaagaccctgcgcgtcctggcttcaggagacaacaaccggatcccagtcatcgggcccctgaagatccgggagcagcagcggtcagctgtctccaccagctggctgctgccctacaactacacatggtcacctgagaaggtgttcgtgcagacacccacaatcaactacacactgcgggactaccgcaagttcttccaggacatcggctttgaagatggctggctcatgcggcaggacacagaagggctggtggaagccacgatgccacctggcgtgcagctgcactgcctctatggcactggcgtccccacaccagactccttctactatgagagcttccctgaccgtgaccctaaaatctgctttggtgacggcgatggtactgtgaacttgaagagtgccctgcagtgccaggcctggcagagccgccaggagcaccaagtgttgctgcaggagctgccaggcagcgagcacatcgagatgctggccaacgccaccaccctggcctatctgaaacgtgtgctccttgggccctgactcctgtgccacaggactcctgtggctcggccgtggacctgctgttggcctctggggctgtcatggcccacgcgttttgcaaagtttgtgactcaccattcaaggccccgagtcttggactgtgaagca

SEQ ID NO: 578 - protein, 412 aa, Homo sapiens
MGLHLRPYRVGLLPDGLLFLLLLLMLLADPALPAGRHPPVVLVPGDLGNQLEAKLDKPTVVHYLCSKKTESYFTIWLNLELLLPVIIDCWIDNIRLVYNKTSRATQFPDGVDVRVPGFGKTFSLEFLDPSKSSVGSYFHTMVESLVGWGYTRGEDVRGAPYDWRRAPNENGPYFLALREMIEEMYQLYGGPVVLVAHSMGNMYTLYFLQRQPQAWKDKYIRAFVSLGAPWGGVAKTLRVLASGDNNRIPVIGPLKIREQQRSAVSTSWLLPYNYTWSPEKVFVQTPTINYTLRDYRKFFQDIGFEDGWLMRQDTEGLVEATMPPGVQLHCLYGTGVPTPDSFYYESFPDRDPKICFGDGDGTVNLKSALQCQAWQSRQEHQVLLQELPGSEHIEMLANATTLAYLKRVLLGP

SEQ ID NO: 579 - DNA, 2423 bp, Homo sapiens
cttcgtgactagtgaggtgcgcaaacgcccgagttttccctggtgcgcgggttccgcctttgcagtgccctccacccttcctggtgtctgacccgcctccttcccaggccttttgttcctgtcccggaaagccggcgtcctgccgcgcgatgcccctgctcggacttcttcccaggagggcctgggcttcgctgctcagccagctcctgcgaccgccctgcgcttcgtgcaccggggcggtccgttgccaaagccaggttgcagaggcagtgttaacatcccaactgaaagcacatcaagagaaaccaaattttattatcaagaccccaaagggtaccagggatcttagtcctcagcatatggttgtgagggagaaaattcttgatttggttatcagctgctttaaacgtcatggagcaaaggggatggacaccccagcatttgagctgaaggaaaccctgactgagaagtatggagaggactctgggctcatgtatgatctgaaggatcaaggtggagagctgttgtccctccgctatgaccttactgttccctttgctcgttatctggccatgaataaggtgaagaagatgaaacgttatcatgttggaaaggtgtggcggcgagagagcccaaccatagtccaaggccgttatagggagttctgccagtgtgattttgacattgctggtcagtttgaccctatgatccccgatgcagagtgtttgaagatcatgtgtgaaatcctaagtggattgcagttgggagactttctcattaaggtaaatgaccggcggattgtggatgggatgtttgctgtctgtggtgttcctgaaagcaagttccgtgccatctgctcctccatagataaactagacaagatggcttggaaagatgtgagacatgagatggtggtgaagaaaggcctggctcctgaggtggctgatcgaattggggactatgtccagtgtcatggtggggtatccctagtagagcaaatgtttcaggatcccagactatcccagaacaagcaggccctggagggcctgggagacctaaagctgctatttgaatacctgactttatttggaattgctgataagatctcctttgacctcagcctggctcggggcctagactactatacaggagtgatctatgaagcagtgctgctgcagaccccaactcaggctggggaggagcccctgaatgtgggcagtgtggctgctggtgggcgctatgatgggctggtgggcatgtttgaccccaagggccacaaggtgccatgtgtgggactcagcattggggttgagcgaatcttctacattgtggagcagaggatgaagaccaaaggtgagaaggtgcggactacagagactcaagtgtttgtggccacaccacagaagaactttctccaagaacggttgaagcttattgcagagctttgggattctggaatcaaggcagagatgctatacaagaacaaccccaaactattaacccagctgcactattgtgagagcacaggcattccactggtggtcattattggtgagcaagaactgaaagaaggggtcatcaagatccgttcagtggccagcagagaggaggtggccattaaacgggaaaattttgtggctgaaattcagaagcgactgtctgagtcttgatccttgcctgattcccatctgctgctctttgtagaaaaggtttcctctagaactgaattcctctggaattgagtgatggacttcacaacaactagccaggaagggtgacaagtaccttctgcctcctccattcttcctgggtgcagaactgtagaagaccctgaggactcctgggctagtgtgagcagctattctgcatgggtgcagatgactggatgtgaaagagacatgctctagctgcagaggcaaatttgaagtgccacggaacgttgtcaagaggtagtgagattgttgctgtgagcaaggctctgggagagtcacctcaggctcaggattctgaaccattgagatcagaaaccagatacttagccttctactgtagctacggaaccagattctggtgaatttgtccacaatcagccattggcctgtctggggagtttttggaagacagcaaagaggggcaatggctgctttcagctttgaggacagatgctatcctaagggcatggcagtacccatgttgatttgacatctctctagcccatccattgcttacagtagaagagtggggctgtatgcttgataatcttgaacattgaacttaatagatgacttgacaaggtagagatctgatattttgagattttggagaccatttcctgtgccagaatcactgctctattccataccgtgccatggaggctgttttagaagtggttggataacatgttaaataaaatattaagtgta

SEQ ID NO: 580 - protein, 506 aa, Homo sapiens
MPLLGLLPRRAWASLLSQLLRPPCASCTGAVRCQSQVAEAVLTSQLKAHQEKPNFIIKTPKGTRDLSPQHMVVREKILDLVISCFKRHGAKGMDTPAFELKETLTEKYGEDSGLMYDLKDQGGELLSLRYDLTVPFARYLAMNKVKKMKRYHVGKVWRRESPTIVQGRYREFCQCDFDIAGQFDPMIPDAECLKIMCEILSGLQLGDFLIKVNDRRIVDGMFAVCGVPESKFRAICSSIDKLDKMAWKDVRHEMVVKKGLAPEVADRIGDYVQCHGGVSLVEQMFQDPRLSQNKQALEGLGDLKLLFEYLTLFGIADKISFDLSLARGLDYYTGVIYEAVLLQTPTQAGEEPLNVGSVAAGGRYDGLVGMFDPKGHKVPCVGLSIGVERIFYIVEQRMKTKGEKVRTTETQVFVATPQKNFLQERLKLIAELWDSGIKAEMLYKNNPKLLTQLHYCESTGIPLVVIIGEQELKEGVIKIRSVASREEVAIKRENFVAEIQKRLSES

SEQ ID NO: 581 - DNA, 2156 bp, Homo sapiens
ggcacgagcccagaaacaaagacttcacggacaaagtcccttggaaccagagagaagccgggatggaaactccaaacaccacagaggactatgacacgaccacagagtttgactatggggatgcaactccgtgccagaaggtgaacgagagggcctttggggcccaactgctgccccctctgtactccttggtatttgtcattggcctggttggaaacatcctggtggtcctggtccttgtgcaatacaagaggctaaaaaacatgaccagcatctacctcctgaacctggccatttctgacctgctcttcctgttcacgcttcccttctggatcgactacaagttgaaggatgactgggtttttggtgatgccatgtgtaagatcctctctgggttttattacacaggcttgtacagcgagatctttttcatcatcctgctgacgattgacaggtacctggccatcgtccacgccgtgtttgccttgcgggcacggaccgtcacttttggtgtcatcaccagcatcatcatttgggccctggccatcttggcttccatgccaggcttatacttttccaagacccaatgggaattcactcaccacacctgcagccttcactttcctcacgaaagcctacgagagtggaagctgtttcaggctctgaaactgaacctctttgggctggtattgcctttgttggtcatgatcatctgctacacagggattataaagattctgctaagacgaccaaatgagaagaaatccaaagctgtccgtttgatttttgtcatcatgatcatcttttttctcttttggaccccctacaatttgactatacttatttctgttttccaagacttcctgttcacccatgagtgtgagcagagcagacatttggacctggctgtgcaagtgacggaggtgatcgcctacacgcactgctgtgtcaacccagtgatctacgccttcgttggtgagaggttccggaagtacctgcggcagttgttccacaggcgtgtggctgtgcacctggttaaatggctccccttcctctccgtggacaggctggagagggtcagctccacatctccctccacaggggagcatgaactctctgctgggttctgactcagaccataggaggccaacccaaaataagcaggcgtgacctgccaggcacactgagccagcagcctggctctcccagccaggttctgactcttggcacagcatggagtcacagccacttgggatagagagggaatgtaatggtggcctggggcttctgaggcttctggggcttcagtcttttccatgaacttctcccctggtagaaagaagatgaatgagcaaaaccaaatattccagagactgggactaagtgtaccagagaagggcttggactcaagcaagatttcagatttgtgaccattagcatttgtcaacaaagtcacccacttcccactattgcttgcacaaaccaattaaacccagtagtggtgactgtgggctccattcaaagtgagctcctaagccatgggagacactgatgtatgaggaatttctgttcttccatcacctccccccccccgccaccctcccactgccaagaacttggaaatagtgatttccacagtgactccactctgagtcccagagccaatcagtagccagcatctgcctccccttcactcccaccgcaggatttgggctcttggaatcctggggaacatagaactcatgacggaagagttgagacctaacgagaaatagaaatgggggaactactgctggcagtggaactaagaaagcccttaggaagaatttttatatccactaaaatcaaacaattcagggagtgggctaagcacgggccatatgaataacatggtgtgcttcttaaaatagccataaaggggagggactcatcatttccatttacccttcttttctgactatttttcagaatctctcttcttttcaagttgggtgatatgttggtagattctaatggctttattgcagcgattaataacaggcaaaaggaagcagggttggtttcccttctttttgttcttcatctaagccttctggttttatgggtcagagttccgactgccatcttggacttgtcagcaaaaaaaaaaaaaaaaa

SEQ ID NO: 582 - protein, 355 aa, Homo sapiens
METPNTTEDYDTTTEFDYGDATPCQKVNERAFGAQLLPPLYSLVFVIGLVGNILVVLVLVQYKRLKNMTSIYLLNLAISDLLFLFTLPFWIDYKLKDDWVFGDAMCKILSGFYYTGLYSEIFFIILLTIDRYLAIVHAVFALRARTVTFGVITSIIIWALAILASMPGLYFSKTQWEFTHHTCSLHFPHESLREWKLFQALKLNLFGLVLPLLVMIICYTGIIKILLRRPNEKKSKAVRLIFVIMIIFFLFWTPYNLTILISVFQDFLFTHECEQSRHLDLAVQVTEVIAYTHCCVNPVIYAFVGERFRKYLRQLFHRRVAVHLVKWLPFLSVDRLERVSSTSPSTGEHELSAGF

SEQ ID NO: 583 - DNA, 2236 bp, Homo sapiens
gctgttgcaacactgcctcactcttcccctcccaccttctctcccctcctctctgctttaattttctcagaattctctggactgaggctccagttctggcctttggggttcaagatcactgggaccaggccgtgatctctatgcccgagtctcaaccctcaactgtcaccccaaggcacttgggacgtcctggacagaccgagtcccgggaagccccagcactgccgctgccacactgccctgagcccaaatgggggagtgagaggccatagctgtctggcatgggcctctccaccgtgcctgacctgctgctgccactggtgctcctggagctgttggtgggaatatacccctcaggggttattggactggtccctcacctaggggacagggagaagagagatagtgtgtgtccccaaggaaaatatatccaccctcaaaataattcgatttgctgtaccaagtgccacaaaggaacctacttgtacaatgactgtccaggcccggggcaggatacggactgcagggagtgtgagagcggctccttcaccgcttcagaaaaccacctcagacactgcctcagctgctccaaatgccgaaaggaaatgggtcaggtggagatctcttcttgcacagtggaccgggacaccgtgtgtggctgcaggaagaaccagtaccggcattattggagtgaaaaccttttccagtgcttcaattgcagcctctgcctcaatgggaccgtgcacctctcctgccaggagaaacagaacaccgtgtgcacctgccatgcaggtttctttctaagagaaaacgagtgtgtctcctgtagtaactgtaagaaaagcctggagtgcacgaagttgtgcctaccccagattgagaatgttaagggcactgaggactcaggcaccacagtgctgttgcccctggtcattttctttggtctttgccttttatccctcctcttcattggtttaatgtatcgctaccaacggtggaagtccaagctctactccattgtttgtgggaaatcgacacctgaaaaagagggggagcttgaaggaactactactaagcccctggccccaaacccaagcttcagtcccactccaggcttcacccccaccctgggcttcagtcccgtgcccagttccaccttcacctccagctccacctatacccccggtgactgtcccaactttgcggctccccgcagagaggtggcaccaccctatcagggggctgaccccatccttgcgacagccctcgcctccgaccccatccccaacccccttcagaagtgggaggacagcgcccacaagccacagagcctagacactgatgaccccgcgacgctgtacgccgtggtggagaacgtgcccccgttgcgctggaaggaattcgtgcggcgcctagggctgagcgaccacgagatcgatcggctggagctgcagaacgggcgctgcctgcgcgaggcgcaatacagcatgctggcgacctggaggcggcgcacgccgcggcgcgaggccacgctggagctgctgggacgcgtgctccgcgacatggacctgctgggctgcctggaggacatcgaggaggcgctttgcggccccgccgccctcccgcccgcgcccagtcttctcagatgaggctgcgcccctgcgggcagctctaaggaccgtcctgcgagatcgccttccaaccccacttttttctggaaaggaggggtcctgcaggggcaagcaggagctagcagccgcctacttggtgctaacccctcgatgtacatagcttttctcagctgcctgcgcgccgccgacagtcagcgctgtgcgcgcggagagaggtgcgccgtgggctcaagagcctgagtgggtggtttgcgaggatgagggacgctatgcctcatgcccgttttgggtgtcctcaccagcaaggctgctcgggggcccctggttcgtccctgagcctttttcacagtgcataagcagttttttttgtttttgttttgttttgttttgtttttaaatcaatcatgttacactaatagaaacttggcactcctgtgccctctgcctggacaagcacatagcaagctgaactgtcctaaggcaggggcgagcacggaacaatggggccttcagctggagctgtggacttttgtacatacactaaaattctgaagttaaagctctgctcttggaaaaaaaaaaaaaaaaaaaaaaaaaaaaaaaaa

SEQ ID NO: 584 - protein, 455 aa, Homo sapiens
MGLSTVPDLLLPLVLLELLVGIYPSGVIGLVPHLGDREKRDSVCPQGKYIHPQNNSICCTKCHKGTYLYNDCPGPGQDTDCRECESGSFTASENHLRHCLSCSKCRKEMGQVEISSCTVDRDTVCGCRKNQYRHYWSENLFQCFNCSLCLNGTVHLSCQEKQNTVCTCHAGFFLRENECVSCSNCKKSLECTKLCLPQIENVKGTEDSGTTVLLPLVIFFGLCLLSLLFIGLMYRYQRWKSKLYSIVCGKSTPEKEGELEGTTTKPLAPNPSFSPTPGFTPTLGFSPVPSSTFTSSSTYTPGDCPNFAAPRREVAPPYQGADPILATALASDPIPNPLQKWEDSAHKPQSLDTDDPATLYAVVENVPPLRWKEFVRRLGLSDHEIDRLELQNGRCLREAQYSMLATWRRRTPRREATLELLGRVLRDMDLLGCLEDIEEALCGPAALPPAPSLLR

SEQ ID NO: 585 - DNA, 1118 bp, Homo sapiens
ctgatgaaagtgcttccaaactgaaaattggacgtgcctttacgatggtaagcgttaacagctcccactgcttctataatgactcctttaagtacactttgtatgggtgcatgttcagcatggtgtttgtgcttgggttagtatccaattgtgttgccatatacattttcatctgcgtcctcaaagtccgaaatgaaactacaacttacatgattaacttggcaatgtcagacttgctttttgtttttactttacccttcaggattttttacttcacaacacggaattggccatttggagatttactttgtaagatttctgtgatgctgttttataccaacatgtacggaagcattctgttcttaacctgtattagtgtagatcgatttctggcaattgtctacccatttaagtcaaagactctaagaaccaaaagaaatgcaaagattgtttgcactggcgtgtggttaactgtgatcggaggaagtgcacccgccgtttttgttcagtctacccactctcagggtaacaatgcctcagaagcctgctttgaaaattttccagaagccacatggaaaacatatctctcaaggattgtaattttcatcgaaatagtgggattttttattcctctaattttaaatgtaacttgttctagtatggtgctaaaaactttaaccaaaccagttacattaagtagaagcaaaataaacaaaactaaggttttaaaaatgatttttgtacatttgatcatattctgtttctgttttgttccttacaatatcaatcttattttatattctcttgtgagaacacaaacatttgttaattgctcagtagtggcagcagtaaggacaatgtacccaatcactctctgtattgctgtttccaactgttgttttgaccctatagtttactactttacatcggacacaattcagaattcaataaaaatgaaaaactggtctgtcaggagaagtgacttcagattctctgaagttcatggtgcagagaattttattcagcataacctacagaccttaaaaagtaagatatttgacaatgaatctgctgcctgaaataaaaccattaggactcactgggacagaactttcaag

SEQ ID NO: 586 - protein, 344 aa, Homo sapiens
MVSVNSSHCFYNDSFKYTLYGCMFSMVFVLGLVSNCVAIYIFICVLKVRNETTTYMINLAMSDLLFVFTLPFRIFYFTTRNWPFGDLLCKISVMLFYTNMYGSILFLTCISVDRFLAIVYPFKSKTLRTKRNAKIVCTGVWLTVIGGSAPAVFVQSTHSQGNNASEACFENFPEATWKTYLSRIVIFIEIVGFFIPLILNVTCSSMVLKTLTKPVTLSRSKINKTKVLKMIFVHLIIFCFCFVPYNINLILYSLVRTQTFVNCSVVAAVRTMYPITLCIAVSNCCFDPIVYYFTSDTIQNSIKMKNWSVRRSDFRFSEVHGAENFIQHNLQTLKSKIFDNESAA

SEQ ID NO: 587 - DNA, 3329 bp, Homo sapiens
cccacgcgtccgcggacgcgtgggtcgacccacgcgtccggccgctcggcccgggggcttcgggctgtcgggccggcgctcccttctctgccaggtggcgagtacacctgctcacgtaggcgtcatgaggtctccggttcgagacctggcccggaacgatggcgaggagagcacggaccgcacgcctcttctaccgggcgccccacgggccgaagccgctccagtgtgctgctctgctcgttacaacttagcaattttggccttttttggtttcttcattgtgtatgcattacgtgtgaatctgagtgttgcgttagtggatatggtagattcaaatacaactttagaagataatagaacttccaaggcatgtccagagcattctgctcccataaaagttcatcataatcaaacgggtaagaagtaccaatgggatgcagaaactcaaggatggattctcggttcctttttttatggctacatcatcacacagattcctggaggatatgttgccagcaaaataggggggaaaatgctgctaggatttgggatccttggcactgctgtcctcaccctgttcactcccattgctgcagatttaggagttggaccactcattgtactcagagcactagaaggactaggagagggtgttacatttccagccatgcatgccatgtggtcttcttgggctccccctcttgaaagaagcaaacttcttagcatttcatatgcaggagcacagcttgggacagtaatttctcttcctctttctggaataatttgctactatatgaattggacttatgtcttctacttttttggtactattggaatattttggtttcttttgtggatctggttagttagtgacacaccacaaaaacacaagagaatttcccattatgaaaaggaatacattctttcatcattaagaaatcagctttcttcacagaagtcagtgccgtgggtacccattttaaaatccctgccactttgggctatcgtagttgcacacttttcttacaactggactttttatactttattgacattattgcctacttatatgaaggagatcctaaggttcaatgttcaagagaatgggtttttatcttcattgccttatttaggctcttggttatgtatgatcctgtctggtcaagctgctgacaatttaagggcaaaatggaatttttcaactttatgtgttcgcagaatttttagccttataggaatgattggacctgcagtattcctggtagctgctggcttcattggctgtgattattctttggccgttgctttcctaactatatcaacaacactgggaggcttttgctcttctggatttagcatcaaccatctggatattgctccttcgtatgctggtatcctcctgggcatcacaaatacatttgccactattccaggaatggttgggcccgtcattgctaaaagtctgacccctgataacactgttggagaatggcaaaccgtgttctatattgctgctgctattaatgtttttggtgccattttctttacactattcgccaaaggtgaagtacaaaactgggctctcaatgatcaccatggacacagacactgaaggaaccaataaataatcctgcctctattaatgtatttttatttatcatgtaacctcaaagtgccttctgtattgtgtaagcattctatgtctttttttaattgtacttgtattagatttttaaggcctataatcatgaaatatcactagttgccagaataataaaatgaactgtgtttaattatgaataatatgtaagctaggacttctactttaggttcacatacctgcctgctagtcgggcaacatgaagtaggacagttctgttgattttttagggccatactaaagggaatgagctgaaacagacctcctgatacctttgcttaattaaactagatgataattctcaggtactgataaacacctgttgttgttcactttcctcataaaaattgtcagctctctctgacacttagacctcaaactttagcatctctgtggagctgccatccactgtataatttcgcctggcaactggactgaggggagtgtgcccaggcagctgccaagcactccctccctggcttcagggtcagagtgcccagcgtttatcagaggcagcatccaagcccagagccagtgtcgactcttcggctggtgcctttcctctgaggggctatcaatgtgtagataaagccctgagtaggcaagagcagtgagatccactgctatggtcttgatacatcctcaaactttcccttcccagcacagaggaatattggctggcatgcaacctgcaaaagaaaaatgcgaagcggccgggcacggtggctcatgcctgtagtcccagcactttggggggctgaggtgggcgaatcatgagatcaggagttcgagaccagcctggccagcatggtgaaaccccatctctactaaaaatacaaaaaattagctgggcgtggtgacgggcgcctgtaatcccagatactcaggaggctgaggtaggagaatcacttgaacctgggagatggaagttgcagtgaaccaagatcacgccactgcactccagcctgggcgatggagcgagactccaactcaaaaaaaaaaaaagaataaagaaagaaaagtgcgatgcccagtcaatcacaaataagatcatcctggtttaaatctactctcacatggatcacagtataaatttctatgtgctgtgttttgttcgtttgtattttgtagagatggggtctcgttttgtcgcccaggctggttttgaactcctggcttcaagcgatcctcctgtctcggcctcacaaagtgttgagactacaggcatgagccactgtgcccagcctgttctatgtttttaagctacacgagaattttttttttaattaattctcactgtttgttcagtctgtcttcatctaagtttgtgttgcagtttaaagttaaagtgacttttaaaggccacatcacctgagactagggtaatcatctttacttctggttcctgaaatcatatttttccagtggaccatcctccagtggctgtggttgttgagcatgctttcagaacacctatgtggcttaaaacttagtttatgttttgtgttcaacactacgtgtaatattttaaaactgtttaatgtgatgtgaatacatttatgtacatttatttttaaatttgtaaatagctttaaattgctatggcaatgtttcttttataaatcatcaaaataaacctttgtgaattgaaaaaaaaaaaaaaaaaaaa

SEQ ID NO: 588 - protein, 495 aa, Homo sapiens
MRSPVRDLARNDGEESTDRTPLLPGAPRAEAAPVCCSARYNLAILAFFGFFIVYALRVNLSVALVDMVDSNTTLEDNRTSKACPEHSAPIKVHHNQTGKKYQWDAETQGWILGSFFYGYIITQIPGGYVASKIGGKMLLGFGILGTAVLTLFTPIAADLGVGPLIVLRALEGLGEGVTFPAMHAMWSSWAPPLERSKLLSISYAGAQLGTVISLPLSGIICYYMNWTYVFYFFGTIGIFWFLLWIWLVSDTPQKHKRISHYEKEYILSSLRNQLSSQKSVPWVPILKSLPLWAIVVAHFSYNWTFYTLLTLLPTYMKEILRFNVQENGFLSSLPYLGSWLCMILSGQAADNLRAKWNFSTLCVRRIFSLIGMIGPAVFLVAAGFIGCDYSLAVAFLTISTTLGGFCSSGFSINHLDIAPSYAGILLGITNTFATIPGMVGPVIAKSLTPDNTVGEWQTVFYIAAAINVFGAIFFTLFAKGEVQNWALNDHHGHRH

SEQ ID NO: 589 - DNA, 2238 bp, Homo sapiens
gtccttcggtgtctgggtgtggtgagtagaggtgtgtgtcacaaagtacagaccattgtgtgtgacaaagcccatcgtgtgtctgtgtgtgtctttatccacgtggatggacgtctctttcttgctctgccccaagacacaccctagcccctccttattctcaaaagggggagctggggagcctccccctaccctggggcctcccctgcccctccccgccctgcctggccgtcaccactccccagagggcacagggctctgctgtgcctcagagcaaaagtcccagagccagcagagcaggctgacgacctgcaagccacagtggctgccctgtgcgtgctgcgaggtgggggaccctgggcaggaagctggctgagccccaagaccccgggggccatgggcggggatctggtgcttggcctgggggccttgagacgccgaaagcgcttgctggagcaggagaagtctctggccggctgggcactggtgctggcaggaactggcattggactcatggtgctgcatgcagagatgctgtggttcggggggtgctcgtgggcgctctacctgttcctggttaaatgcacgatcagcatttccaccttcttactcctctgcctcatcgtggcctttcatgccaaagaggtccagctgttcatgaccgacaacgggctgcgggactggcgcgtggcgctgaccgggcggcaggcggcgcagatcgtgctggagctggtggtgtgtgggctgcacccggcgcccgtgcggggcccgccgtgcgtgcaggatttaggggcgccgctgacctccccgcagccctggccgggattcctgggccaaggggaagcgctgctgtccctggccatgctgctgcgtctctacctggtgccccgcgccgtgctcctgcgcagcggcgtcctgctcaacgcttcctaccgcagcatcggcgctctcaatcaagtccgcttccgccactggttcgtggccaagctttacatgaacacgcaccctggccgcctgctgctcggcctcacgcttggcctctggctgaccaccgcctgggtgctgtccgtggccgagaggcaggctgttaatgccactgggcacctttcagacacactttggctgatccccatcacattcctgaccatcggctatggtgacgtggtgccgggcaccatgtggggcaagatcgtctgcctgtgcactggagtcatgggtgtctgctgcacagccctgctggtggccgtggtggcccggaagctggagtttaacaaggcagagaagcacgtgcacaacttcatgatggatatccagtataccaaagagatgaaggagtccgctgcccgagtgctacaagaagcctggatgttctacaaacatactcgcaggaaggagtctcatgctgcccgcaggcatcagcgcaagctgctggccgccatcaacgcgttccgccaggtgcggctgaaacaccggaagctccgggaacaagtgaactccatggtggacatctccaagatgcacatgatcctgtatgacctgcagcagaatctgagcagctcacaccgggccctggagaaacagattgacacgctggcggggaagctggatgccctgactgagctgcttagcactgccctggggccgaggcagcttccagaacccagccagcagtccaagtagctggacccacgaggaggaaccaggctactttccccagtactgaggtggtggacatcgtctctgccactcctgacccagccctgaacaaagcacctcaagtgcaaggaccaaagggggccctggcttggagtgggttggcttgctgatggctgctggaggggacgctggctaaagtgggtaggccttggcccacctgaggccccaggtgggaacatggtcacccccactctgcataccctcatcaaaaacactctcactatgctgctatggacgacctccagctctcagttacaagtgcaggcgactggaggcaggactcctgggtccctgggaaagagggtactaggggcccggatccaggattctgggaggcttcagttaccgctggccgagctgaagaactgggtatgaggctggggcggggctggaggtggcgccccctggtgggacaacaaagaggacaccatttttccagagctgcagagagcacctggtggggaggaagaagtgtaactcaccagcctctgctcttatctttgtaataaatgttaaagccag

SEQ ID NO: 590 - protein, 427 aa, Homo sapiens
MGGDLVLGLGALRRRKRLLEQEKSLAGWALVLAGTGIGLMVLHAEMLWFGGCSWALYLFLVKCTISISTFLLLCLIVAFHAKEVQLFMTDNGLRDWRVALTGRQAAQIVLELVVCGLHPAPVRGPPCVQDLGAPLTSPQPWPGFLGQGEALLSLAMLLRLYLVPRAVLLRSGVLLNASYRSIGALNQVRFRHWFVAKLYMNTHPGRLLLGLTLGLWLTTAWVLSVAERQAVNATGHLSDTLWLIPITFLTIGYGDVVPGTMWGKIVCLCTGVMGVCCTALLVAVVARKLEFNKAEKHVHNFMMDIQYTKEMKESAARVLQEAWMFYKHTRRKESHAARRHQRKLLAAINAFRQVRLKHRKLREQVNSMVDISKMHMILYDLQQNLSSSHRALEKQIDTLAGKLDALTELLSTALGPRQLPEPSQQSK

SEQ ID NO: 591 - DNA, 1169 bp, Homo sapiens
gaggttgaaggacccaggcgtgtcagccctgctccagagaccttgggcatggaggagagtgtcgtacggccctcagtgtttgtggtggatggacagaccgacatcccattcacgaggctgggacgaagccaccggagacagtcgtgcagtgtggcccgggtgggtctgggtctcttgctgttgctgatgggggctgggctggccgtccaaggctggttcctcctgcagctgcactggcgtctaggagagatggtcacccgcctgcctgacggacctgcaggctcctgggagcagctgatacaagagcgaaggtctcacgaggtcaacccagcagcgcatctcacaggggccaactccagcttgaccggcagcggggggccgctgttatgggagactcagctgggcctggccttcctgaggggcctcagctaccacgatggggcccttgtggtcaccaaagctggctactactacatctactccaaggtgcagctgggcggtgtgggctgcccgctgggcctggccagcaccatcacccacggcctctacaagcgcacaccccgctaccccgaggagctggagctgttggtcagccagcagtcaccctgcggacgggccaccagcagctcccgggtctggtgggacagcagcttcctgggtggtgtggtacacctggaggctggggaggaggtggtcgtccgtgtgctggatgaacgcctggttcgactgcgtgatggtacccggtcttacttcggggctttcatggtgtgaaggaaggagcgtggtgcattggacatgggtctgacacgtggagaactcagagggtgcctcaggggaaagaaaactcacgaagcagaggctgggcgtggtggctctcgcctgtaatcccagcactttgggaggccaaggcaggcggatcacctgaggtcaggagttcgagaccagcctggctaacatggcaaaaccccatctctactaaaaatacaaaaattagccggacgtggtggtgcctgcctgtaatccagctactcaggaggctgaggcaggataattttgcttaaacccgggaggcggaggttgcagtgagccgagatcacaccactgcactccaacctgggaaacgcagtgagactgtgcctcaaaaaaaaaaaaaaaaaaaaaaaaaaaaa

SEQ ID NO: 592 - protein, 240 aa, Homo sapiens
MEESVVRPSVFVVDGQTDIPFTRLGRSHRRQSCSVARVGLGLLLLLMGAGLAVQGWFLLQLHWRLGEMVTRLPDGPAGSWEQLIQERRSHEVNPAAHLTGANSSLTGSGGPLLWETQLGLAFLRGLSYHDGALVVTKAGYYYIYSKVQLGGVGCPLGLASTITHGLYKRTPRYPEELELLVSQQSPCGRATSSSRVWWDSSFLGGVVHLEAGEEVVVRVLDERLVRLRDGTRSYFGAFMV

SEQ ID NO: 593 - DNA, 2011 bp, Homo sapiens
tacctgtgcggccctcaacgtctccttggtgcgggacccgttcactttcggctcccggagtctccctccactgctcagacctctggacctgacaggagacgcctacttggctctgacgcggcgccccagcccggcatgtgtccccggcgccccggaccaccctccctgccggctttgggtgcgttgtggggtcccgaggattcgcgagatttgttgaaagacattcaagattacgaagtttagatgaccaaaatggatatccgaggtgctgtggatgctgctgtccccaccaatattattgctgccaaggctgcagaagttcgtgcaaacaaagtcaactggcaatcctatcttcagggacagatgatttctgctgaagattgtgagtttattcagaggtttgaaatgaaacgaagccctgaagagaagcaagagatgcttcaaactgaaggcagccagtgtgctaaaacatttataaatctgatgactcatatctgcaaagaacagaccgttcagtatatactaactatggtggatgatatgctgcaggaaaatcatcagcgtgttagcattttctttgactatgcaagatgtagcaagaacactgcgtggccctactttctgccaatgttgaatcgccaggatcccttcactgttcatatggcagcaagaattattgccaagttagcagcttggggaaaagaactgatggaaggcagtgacttaaattactatttcaattggataaaaactcagctgagttcacagaaactgcgtggtagcggtgttgctgttgaaacaggaacagtctcttcaagtgatagttcgcagtatgtgcagtgcgtggccgggtgtttgcagctgatgctccgggtcaatgagtaccgctttgcttgggtggaagcagatggggtaaattgcataatgggagtgttgagtaacaagtgtggctttcagctccagtatcaaatgattttttcaatatggctcctggcattcagtcctcaaatgtgtgaacacctgcggcgctataatatcattccagttctgtctgatatccttcaggagtctgtcaaagagaaagtaacaagaatcattcttgcagcatttcgtaactttttagaaaaatcaactgaaagagaaactcgccaagaatatgccctggctatgattcagtgcaaagttctgaaacagttggagaacttggaacagcagaagtacgatgatgaagatatcagcgaagatatcaaatttcttttggaaaaacttggagagagtgtccaggaccttagttcatttgatgaatacagttcagaacttaaatctggaaggttggaatggagtcctgtgcacaaatctgagaaattttggagagagaatgctgtgaggttaaatgagaagaattatgaactcttgaaaatcttgacaaaacttttggaagtgtcagatgatccccaagtcttagctgttgctgctcacgatgttggagaatatgtgcggcattatccacgaggcaaacgggtcatcgagcagctcggtgggaagcagctggtcatgaaccacatgcatcatgaagaccagcaggtccgctataatgctctgctggccgtgcagaagctcatggtgcacaactgggaataccttggcaagcagctccagtccgagcagccccagaccgctgccgcccgaagctaagcctcgcctctggccttcccctccgcctcaatgcagaaccagtagtgggagcactgtgtttagagttaagagtgaacactgtttgattttacttggaatttcctctgttatatagcttttcccaatgctaatttccaaacaacaacaacaaaataacatgtttgcctgttaagttgtataaaagtaggtgattctgtatttaaagaaaatattactgttacatatactgcttgcaatttctgtatttattgttctctggaaataaatatagttattaaaggattctcactccaaaaaaaaaaaaaaaaaaaaaaaa

SEQ ID NO: 594 - protein, 483 aa, Homo sapiens
MTKMDIRGAVDAAVPTNIIAAKAAEVRANKVNWQSYLQGQMISAEDCEFIQRFEMKRSPEEKQEMLQTEGSQCAKTFINLMTHICKEQTVQYILTMVDDMLQENHQRVSIFFDYARCSKNTAWPYFLPMLNRQDPFTVHMAARIIAKLAAWGKELMEGSDLNYYFNWIKTQLSSQKLRGSGVAVETGTVSSSDSSQYVQCVAGCLQLMLRVNEYRFAWVEADGVNCIMGVLSNKCGFQLQYQMIFSIWLLAFSPQMCEHLRRYNIIPVLSDILQESVKEKVTRIILAAFRNFLEKSTERETRQEYALAMIQCKVLKQLENLEQQKYDDEDISEDIKFLLEKLGESVQDLSSFDEYSSELKSGRLEWSPVHKSEKFWRENAVRLNEKNYELLKILTKLLEVSDDPQVLAVAAHDVGEYVRHYPRGKRVIEQLGGKQLVMNHMHHEDQQVRYNALLAVQKLMVHNWEYLGKQLQSEQPQTAAARS

SEQ ID NO: 595 - DNA, 2932 bp, Homo sapiens
gtaatgcagagataataaaacttcttaggtccataggtcttataataatttaataacctaaacatggtatacaaattcctccaaacccaataacataattatagtttcaaaaagttccccaaactttcaagttagattttattgctttgatgagtggctttaaatatgaaaagtcttgcctgtgaagggcaatccttttcccgtggactgggatctatagaaatacagaaatgtgcccaggggttcatctccctaataaccatcattcacatttctcaacctccctaataaccagccaccatgtgagaaggatccacagttactgtttatgactataattaactagtacctgggactggtcagtggagttggttgcaacctgatgctaaggatgtcaaagttgtctcggcctctgttcccagccagtaagtaattccctggcctcgggccataccccctaatcttggtcagctgattatgacaggcagacagcacagtaaataacactatatattaagaaaacccaaagcatatgtatcaatggtatatacccaacagcatcctaggaatggagagtctgtagcaagggcctccaatgtgaaggtcaacacagtcactgtgatgcgtgtatttccattttgtaaagcatgatctctggtggtcatttttatcttcctaacttattggaaaagtctcctgttttgggggcccgcccctggtcacagccagactgactcagtttccctgggaggtcccgctcgagcccgtccttcccctccctctgcccgcccccagccctcgccccaccctcggcgcccgcacatctgcctgctcagctccagacggcgcccggacccccgggcgcgggatccagccaggtgggagccccgcagatgaggtctctgaaggtgtgcctgaaccagtgccagcctgccctgtctgcagcatcggcctgatggggtggtgactgatccctcagggctccggagccatgtggcccaacggcagttccctggggccctgtttccggcccacaaacattaccctggaggagagacggctgatcgcctcgccctggttcgccgcctccttctgcgtggtgggcctggcctccaacctgctggccctgagcgtgctggcgggcgcgcggcaggggggttcgcacacgcgctcctccttcctcaccttcctctgcggcctcgtcctcaccgacttcctggggctgctggtgaccggtaccatcgtggtgtcccagcacgccgcgctcttcgagtggcacgccgtggaccctggctgccgtctctgtcgcttcatgggcgtcgtcatgatcttcttcggcctgtccccgctgctgctgggggccgccatggcctcagagcgctacctgggtatcacccggcccttctcgcgcccggcggtcgcctcgcagcgccgcgcctgggccaccgtggggctggtgtgggcggccgcgctggcgctgggcctgctgcccctgctgggcgtgggtcgctacaccgtgcaatacccggggtcctggtgcttcctgacgctgggcgccgagtccggggacgtggccttcgggctgctcttctccatgctgggcggcctctcggtcgggctgtccttcctgctgaacacggtcagcgtggccaccctgtgccacgtctaccacgggcaggaggcggcccagcagcgtccccgggactccgaggtggagatgatggctcagctcctggggatcatggtggtggccagcgtgtgttggctgccccttctggtcttcattgcccagacagtgctgcgaaacccgcctgccatgagccccgccgggcagctgtcccgcaccacggagaaggagctgctcatctacttgcgcgtggccacctggaaccagatcctggacccctgggtgtatatcctgttccgccgcgccgtgctccggcgtctccagcctcgcctcagcacccggcccaggtcgctgtccctccagccccagctcacgcagcgctccgggctgcagtaggaagtggacagagcgcccctcccgcgcctttccgcggagcccttggcccctcggacagcccatctgcctgttctgaggattcaggggctgggggtgctggatggacagtgggcatcagcagcagggttttgggttgaccccaatccaacccggggacccccaactcctccctgatccttttaccaagcactctcccttcctcggcccctttttcccatccagagctcccaccccttctctgcgtccctcccaaccccaggaagggcatgcagacattggaagagggtcttgcattgctatttttttttttagacggagtcttgctctgtcccccaggctggagtgcagtggcgcaatctcagctcactgcaacctccacctcccgggttcaagcgattctcctgcctcagcctcctgagtagctgggactataggcgcgcgccaccacgcccggctaatttttgtatttttagtagagacggggtttcaccgtgttggccaggctggtcttgaactcctgacctcaggtgattcaccagcctcagcctcccaaagtgctgggatcacaggcatgaaccaccacacctggccattttttttttttttttagacggagtctcactctgtggcccagcctggagtacagtggcacgatctcggctcactgcaacctccgcctcccgggttcaagcgattctcgtgcctcagcctcccgagcagctgggattacaggcgtaagccactgcgcccggccttgcatgctctttgaccctgaatttgacctacttgctggggtacagttgcttccttttgaacctccaacagggaaggctctgtccagaaaggattgaatgtgaaacgggggcacccccttttcttgccaaaatatatctctgcctttggttttat

SEQ ID NO: 596 - protein, 343 aa, Homo sapiens
MWPNGSSLGPCFRPTNITLEERRLIASPWFAASFCVVGLASNLLALSVLAGARQGGSHTRSSFLTFLCGLVLTDFLGLLVTGTIVVSQHAALFEWHAVDPGCRLCRFMGVVMIFFGLSPLLLGAAMASERYLGITRPFSRPAVASQRRAWATVGLVWAAALALGLLPLLGVGRYTVQYPGSWCFLTLGAESGDVAFGLLFSMLGGLSVGLSFLLNTVSVATLCHVYHGQEAAQQRPRDSEVEMMAQLLGIMVVASVCWLPLLVFIAQTVLRNPPAMSPAGQLSRTTEKELLIYLRVATWNQILDPWVYILFRRAVLRRLQPRLSTRPRSLSLQPQLTQRSGLQ

SEQ ID NO: 597 - DNA, 1976 bp, Homo sapiens
tgtttgaatttggaaacccatgttggctgtcccaaatatgagatttggcatctttcttttgtggtggggatgggttttggccactgaaagcagaatgcactggcccggaagagaagtccacgagatgtctaagaaaggcaggccccaaagacaaagacgagaagtacatgaagatgcccacaagcaagtcagcccaattctgagacgaagtcctgacatcaccaaatcgcctctgacaaagtcagaacagcttctgaggatagatgaccatgatttcagcatgaggcctggctttggaggccctgccattcctgttggtgtggatgtgcaggtggagagtttggatagcatctcagaggttgacatggactttacgatgaccctctacctgaggcactactggaaggacgagaggctgtcttttccaagcaccaacaacctcagcatgacgtttgacggccggctggtcaagaagatctgggtccctgacatgtttttcgtgcactccaaacgctccttcatccacgacaccaccacagacaacgtcatgttgcgggtccagcctgatgggaaagtgctctatagtctcagggttacagtaactgcaatgtgcaacatggacttcagccgatttcccttggacacacaaacgtgctctcttgaaattgaaagctatgcctatacagaagatgacctcatgctgtactggaaaaagggcaatgactccttaaagacagatgaacggatctcactctcccagttcctcattcaggaattccacaccaccaccaaactggctttctacagcagcacaggctggtacaaccgtctctacattaatttcacgttgcgtcgccacatcttcttcttcttgctccaaacttatttccccgctaccctgatggtcatgctgtcctgggtgtccttctggatcgaccgcagagccgtgcctgccagagtccccttaggtatcacaacggtgctgaccatgtccaccatcatcacgggcgtgaatgcctccatgccgcgcgtctcctacatcaaggccgtggacatctacctctgggtcagctttgtgttcgtgttcctctcggtgctggagtatgcggccgtcaactacctgaccactgtgcaggagaggaaggaacagaagctgcgggagaagcttccctgcaccagcggattacctccgccccgcactgcgatgctggacggcaactacagtgatggggaggtgaatgacctggacaactacatgccagagaatggagagaagcccgacaggatgatggtgcagctgaccctggcctcagagaggagctccccacagaggaaaagtcagagaagcagctatgtgagcatgagaatcgacacccacgccattgataaatactccaggatcatctttccagcagcatacattttattcaatttaatatactggtctattttctcctagatgcttgtaattctacaaatttcacatttccatggcatgcactacagaaataactgtataatgaaaaagtatttaaggatatggttaaaaaaaaatcccaggacccacccatgttttcactatcccttctgcagctttccaaagctacattgacgagacacttactggtttaatttgcacttattaaccatctattgaatacacagcattatattaggtgctgcaggaaatacgacactgtagcgactgatgttagttgttacccagatcccctggaaaagcacactaccagtgttgtgggcacatttagttccacccgttagacccttgatgctattcacatgaataatttattttcctcaagtgtcattacattgttcaggctacgtgaacttggaagcacctacaggccatttgcatgaaattcacatgcacctaaatcctcactttgacagaaactcatgcttcagtttataacctattacctattttgtatgcgactccacctccgcatgtt

SEQ ID NO: 598 - protein, 473 aa, Homo sapiens
MRFGIFLLWWGWVLATESRMHWPGREVHEMSKKGRPQRQRREVHEDAHKQVSPILRRSPDITKSPLTKSEQLLRIDDHDFSMRPGFGGPAIPVGVDVQVESLDSISEVDMDFTMTLYLRHYWKDERLSFPSTNNLSMTFDGRLVKKIWVPDMFFVHSKRSFIHDTTTDNVMLRVQPDGKVLYSLRVTVTAMCNMDFSRFPLDTQTCSLEIESYAYTEDDLMLYWKKGNDSLKTDERISLSQFLIQEFHTTTKLAFYSSTGWYNRLYINFTLRRHIFFFLLQTYFPATLMVMLSWVSFWIDRRAVPARVPLGITTVLTMSTIITGVNASMPRVSYIKAVDIYLWVSFVFVFLSVLEYAAVNYLTTVQERKEQKLREKLPCTSGLPPPRTAMLDGNYSDGEVNDLDNYMPENGEKPDRMMVQLTLASERSSPQRKSQRSSYVSMRIDTHAIDKYSRIIFPAAYILFNLIYWSIFS

SEQ ID NO: 599 - DNA, 2241 bp, Homo sapiens
atctttgctgcaaaggctgggtatcggctgtgctcagcaaagcgtcaactcgtgcaagaacttagcaggaatagttctggctaaggttaggaggctgccaccaaagtctcttttttgttcctctgcttctcccgtttgcctccttatcatgagatctttttgctaagctggcagaaagattgcatagtcagtgcttccagctctgctcccacctgatcctgcactgtcctctggtccctgaatgaatgaactctgatacccaatcttgtctcgagccttctctatgccactcatggctcctcttctgctctttccatctttttgctgagagttctgagctctgtacttcctcttggcccatctcacttcctgaaacacccctgaagagggttgcttatcttgatggaactcaaaaagccaaaaagctgcaggcagaggcgttgaggacatctgtttggggaactaagagcagcagcactttcagattcagtccatatagagctgtcctacagcattctggaaacttgaggatgtgcggtgcataaaggggctggaagtgacccacctgtgatgagccctttctaaggagaagggtttccaagagatcaccccaccagaaaagggtaggaatgagcaagttgggaattttagactgtcactgcacatggacctctgggaagacgtctggcgagagctaggcccactggccctacagacggatcttgctggctcacctgtccctgtggaggttcccctgggaaggcaagatgcccaacaacagcactgctctgtcattggccaatgttacctacatcaccatggaaattttcattggactctgcgccatagtgggcaacgtgctggtcatctgcgtggtcaagctgaaccccagcctgcagaccaccaccttctatttcattgtctctctagccctggctgacattgctgttggggtgctggtcatgcctttggccattgttgtcagcctgggcatcacaatccacttctacagctgcctttttatgacttgcctactgcttatctttacccacgcctccatcatgtccttgctggccatcgctgtggaccgatacttgcgggtcaagcttaccgtcagatacaagagggtcaccactcacagaagaatatggctggccctgggcctttgctggctggtgtcattcctggtgggattgacccccatgtttggctggaacatgaaactgacctcagagtaccacagaaatgtcaccttcctttcatgccaatttgtttccgtcatgagaatggactacatggtatacttcagcttcctcacctggattttcatccccctggttgtcatgtgcgccatctatcttgacatcttttacatcattcggaacaaactcagtctgaacttatctaactccaaagagacaggtgcattttatggacgggagttcaagacggctaagtccttgtttctggttcttttcttgtttgctctgtcatggctgcctttatctatcatcaactgcatcatctactttaatggtgaggtaccacagcttgtgctgtacatgggcatcctgctgtcccatgccaactccatgatgaaccctatcgtctatgcctataaaataaagaagttcaaggaaacctaccttttgatcctcaaagcctgtgtggtctgccatccctctgattctttggacacaagcattgagaagaattctgagtagttatccatcagagatgactctgtctcattgaccttcagattccccatcaacaaacacttgagggcctgtatgcctgggccaagggatttttacatccttgattacttccactgaggtgggagcatctccagtgctccccaattatatctcccccactccactactctcttcctccacttcatttttcctttgtcctttctctctaattcagtgttttggaggcctgacttggggacaacgtattattgatattattgtctgttttccttcttcccaatagaagaataagtcatggagcctgaagggtgcctagttgacttactgacaaaaggctctagttgggctgaacatgtgtgtggtggtgactcatttccatgccattgtggaattgagcagagaacctgctctcggaggatgcctagaagatgttgggaacagaagaaataaactgagtttaagggggacttaaactgctgaattcacctgtggatgtttttgagtaaataaaagctaatag

SEQ ID NO: 600 - protein, 318 aa, Homo sapiens
MPNNSTALSLANVTYITMEIFIGLCAIVGNVLVICVVKLNPSLQTTTFYFIVSLALADIAVGVLVMPLAIVVSLGITIHFYSCLFMTCLLLIFTHASIMSLLAIAVDRYLRVKLTVRYKRVTTHRRIWLALGLCWLVSFLVGLTPMFGWNMKLTSEYHRNVTFLSCQFVSVMRMDYMVYFSFLTWIFIPLVVMCAIYLDIFYIIRNKLSLNLSNSKETGAFYGREFKTAKSLFLVLFLFALSWLPLSIINCIIYFNGEVPQLVLYMGILLSHANSMMNPIVYAYKIKKFKETYLLILKACVVCHPSDSLDTSIEKNSE

SEQ ID NO: 601 - DNA, 4204 bp, Homo sapiens
caggacagggaagagcgggcgctatggggagccggacgccagagtcccctctccacgccgtgcagctgcgctggggcccccggcgccgacccccgctcgtgccgctgctgttgctgctcgtgccgccgccacccagggtcgggggcttcaacttagacgcggaggccccagcagtactctcggggcccccgggctccttcttcggattctcagtggagttttaccggccgggaacagacggggtcagtgtgctggtgggagcacccaaggctaataccagccagccaggagtgctgcagggtggtgctgtctacctctgtccttggggtgccagccccacacagtgcacccccattgaatttgacagcaaaggctctcggctcctggagtcctcactgtccagctcagagggagaggagcctgtggagtacaagtccttgcagtggttcggggcaacagttcgagcccatggctcctccatcttggcatgcgctccactgtacagctggcgcacagagaaggagccactgagcgaccccgtgggcacctgctacctctccacagataacttcacccgaattctggagtatgcaccctgccgctcagatttcagctgggcagcaggacagggttactgccaaggaggcttcagtgccgagttcaccaagactggccgtgtggttttaggtggaccaggaagctatttctggcaaggccagatcctgtctgccactcaggagcagattgcagaatcttattaccccgagtacctgatcaacctggttcaggggcagctgcagactcgccaggccagttccatctatgatgacagctacctaggatactctgtggctgttggtgaattcagtggtgatgacacagaagactttgttgctggtgtgcccaaagggaacctcacttacggctatgtcaccatccttaatggctcagacattcgatccctctacaacttctcaggggaacagatggcctcctactttggctatgcagtggccgccacagacgtcaatggggacgggctggatgacttgctggtgggggcacccctgctcatggatcggacccctgacgggcggcctcaggaggtgggcagggtctacgtctacctgcagcacccagccggcatagagcccacgcccacccttaccctcactggccatgatgagtttggccgatttggcagctccttgacccccctgggggacctggaccaggatggctacaatgatgtggccatcggggctccctttggtggggagacccagcagggagtagtgtttgtatttcctgggggcccaggagggctgggctctaagccttcccaggttctgcagcccctgtgggcagccagccacaccccagacttctttggctctgcccttcgaggaggccgagacctggatggcaatggatatcctgatctgattgtggggtcctttggtgtggacaaggctgtggtatacaggggccgccccatcgtgtccgctagtgcctccctcaccatcttccccgccatgttcaacccagaggagcggagctgcagcttagaggggaaccctgtggcctgcatcaaccttagcttctgcctcaatgcttctggaaaacacgttgctgactccattggtttcacagtggaacttcagctggactggcagaagcagaagggaggggtacggcgggcactgttcctggcctccaggcaggcaaccctgacccagaccctgctcatccagaatggggctcgagaggattgcagagagatgaagatctacctcaggaacgagtcagaatttcgagacaaactctcgccgattcacatcgctctcaacttctccttggacccccaagccccagtggacagccacggcctcaggccagccctacattatcagagcaagagccggatagaggacaaggctcagatcttgctggactgtggagaagacaacatctgtgtgcctgacctgcagctggaagtgtttggggagcagaaccatgtgtacctgggtgacaagaatgccctgaacctcactttccatgcccagaatgtgggtgagggtggcgcctatgaggctgagcttcgggtcaccgcccctccagaggctgagtactcaggactcgtcagacacccagggaacttctccagcctgagctgtgactactttgccgtgaaccagagccgcctgctggtgtgtgacctgggcaaccccatgaaggcaggagccagtctgtggggtggccttcggtttacagtccctcatctccgggacactaagaaaaccatccagtttgacttccagatcctcagcaagaatctcaacaactcgcaaagcgacgtggtttcctttcggctctccgtggaggctcaggcccaggtcaccctgaacggtgtctccaagcctgaggcagtgctattcccagtaagcgactggcatccccgagaccagcctcagaaggaggaggacctgggacctgctgtccaccatgtctatgagctcatcaaccaaggccccagctccattagccagggtgtgctggaactcagctgtccccaggctctggaaggtcagcagctcctatatgtgaccagagttacgggactcaactgcaccaccaatcaccccattaacccaaagggcctggagttggatcccgagggttccctgcaccaccagcaaaaacgggaagctccaagccgcagctctgcttcctcgggacctcagatcctgaaatgcccggaggctgagtgtttcaggctgcgctgtgagctcgggcccctgcaccaacaagagagccaaagtctgcagttgcatttccgagtctgggccaagactttcttgcagcgggagcaccagccatttagcctgcagtgtgaggctgtgtacaaagccctgaagatgccctaccgaatcctgcctcggcagctgccccaaaaagagcgtcaggtggccacagctgtgcaatggaccaaggcagaaggcagctatggcgtcccactgtggatcatcatcctagccatcctgtttggcctcctgctcctaggtctactcatctacatcctctacaagcttggattcttcaaacgctccctcccatatggcaccgccatggaaaaagctcagctcaagcctccagccacctctgatgcctgagtcctcccaatttcagactcccattcctgaagaaccagtccccccaccctcattctactgaaaaggaggggtctgggtacttcttgaaggtgctgacggccagggagaagctcctctccccagcccagagacatacttgaagggccagagccaggggggtgaggagctggggatccctcccccccatgcactgtgaaggacccttgtttacacataccctcttcatggatgggggaactcagatccagggacagaggcccagcctccctgaagcctttgcattttggagagtttcctgaaacaactggaaagataactaggaaatccattcacagttctttgggccagacatgccacaaggacttcctgtccagctccaacctgcaaagatctgtcctcagccttgccagagatccaaaagaagcccccagtaagaacctggaacttggggagttaagacctggcagctctggacagccccaccctggtgggccaacaaagaacactaactatgcatggtgccccaggaccagctcaggacagatgccacaaggatagatgctggcccagggccagagcccagctccaaggggaatcagaactcaaatggggccagatccagcctggggtctggagttgatctggaacccagactcagacattggcaccaatccaggcagatccaggactatatttgggcctgctccagacctgatcctggaggcccagttcaccctgatttaggagaagccaggaatttcccaggacctgaaggggccatgatggcaacagatctggaacctcagcctggccagacacaggccctccctgttccccagagaaaggggagcccactgtcctgggcctgcagaatttgggttctgcctgccagctgcactgatgctgcccctcatctctctgcccaacccttccctcaccttggcaccagacacccaggacttatttaaactctgttgcaagtgcaataaatctgacccagtgcccccactgaccagaactagaaaaaaaaa

SEQ ID NO: 602 - protein, 1049 aa, Homo sapiens
MGSRTPESPLHAVQLRWGPRRRPPLVPLLLLLVPPPPRVGGFNLDAEAPAVLSGPPGSFFGFSVEFYRPGTDGVSVLVGAPKANTSQPGVLQGGAVYLCPWGASPTQCTPIEFDSKGSRLLESSLSSSEGEEPVEYKSLQWFGATVRAHGSSILACAPLYSWRTEKEPLSDPVGTCYLSTDNFTRILEYAPCRSDFSWAAGQGYCQGGFSAEFTKTGRVVLGGPGSYFWQGQILSATQEQIAESYYPEYLINLVQGQLQTRQASSIYDDSYLGYSVAVGEFSGDDTEDFVAGVPKGNLTYGYVTILNGSDIRSLYNFSGEQMASYFGYAVAATDVNGDGLDDLLVGAPLLMDRTPDGRPQEVGRVYVYLQHPAGIEPTPTLTLTGHDEFGRFGSSLTPLGDLDQDGYNDVAIGAPFGGETQQGVVFVFPGGPGGLGSKPSQVLQPLWAASHTPDFFGSALRGGRDLDGNGYPDLIVGSFGVDKAVVYRGRPIVSASASLTIFPAMFNPEERSCSLEGNPVACINLSFCLNASGKHVADSIGFTVELQLDWQKQKGGVRRALFLASRQATLTQTLLIQNGAREDCREMKIYLRNESEFRDKLSPIHIALNFSLDPQAPVDSHGLRPALHYQSKSRIEDKAQILLDCGEDNICVPDLQLEVFGEQNHVYLGDKNALNLTFHAQNVGEGGAYEAELRVTAPPEAEYSGLVRHPGNFSSLSCDYFAVNQSRLLVCDLGNPMKAGASLWGGLRFTVPHLRDTKKTIQFDFQILSKNLNNSQSDVVSFRLSVEAQAQVTLNGVSKPEAVLFPVSDWHPRDQPQKEEDLGPAVHHVYELINQGPSSISQGVLELSCPQALEGQQLLYVTRVTGLNCTTNHPINPKGLELDPEGSLHHQQKREAPSRSSASSGPQILKCPEAECFRLRCELGPLHQQESQSLQLHFRVWAKTFLQREHQPFSLQCEAVYKALKMPYRILPRQLPQKERQVATAVQWTKAEGSYGVPLWIIILAILFGLLLLGLLIYILYKLGFFKRSLPYGTAMEKAQLKPPATSDA

SEQ ID NO: 603 - DNA, 4220 bp, Homo sapiens
aggagaagtctgagcattctttttttcttttttattactataggatggaggatgaagctgtcctggacagaggggcttccttcctcaagcatgtgtgtgatgaagaagaagtagaaggccaccataccatttacatcggagtccatgtgccgaagagttacaggagaaggagacgtcacaagagaaagacagggcacaaagaaaagaaggaaaaggagagaatctctgagaactactctgacaaatcagatattgaaaatgctgatgaatccagcagcagcatcctaaaacctctcatctctcctgctgcagaacgcatccgattcatcttgggagaggaggatgacagcccagctccccctcagctcttcacggaactggatgagctgctggccgtggatgggcaggagatggagtggaaggaaacagccaggtggatcaagtttgaagaaaaagtggaacagggtggggaaagatggagcaagccccatgtggccacattgtcccttcatagtttatttgagctgaggacatgtatggagaaaggatccatcatgcttgatcgggaggcttcttctctcccacagttggtggagatgattgttgaccatcagattgagacaggcctattgaaacctgaacttaaggataaggtgacctatactttgctccggaagcaccggcatcaaaccaagaaatccaaccttcggtccctggctgacattgggaagacagtctccagtgcaagtaggatgtttaccaaccctgataatggtagcccagccatgacccataggaatctgacttccttcagtctgaatgacatttctgataaaccggagaaggaccagctgaagaataagttcatgaaaaaattgccacgtgatgcagaagcttccaacgtgcttgttggggaggttgactttttggatactcctttcattgcctttgttaggctacagcaggctgtcatgctgggtgccctgactgaagttcctgtgcccacaaggttcttgttcattctcttaggtcctaaggggaaagccaagtcctaccacgagattggcagagccattgccaccctgatgtctgatgaggtgttccatgacattgcttataaagcaaaagacaggcacgacctgattgctggtattgatgagttcctagatgaagtcatcgtccttccacctggggaatgggatccagcaattaggatagagcctcctaagagtcttccatcctctgacaaaagaaagaatatgtactcaggtggagagaatgttcagatgaatggggatacgccccatgatggaggtcacggaggaggaggacatggggattgtgaagaattgcagcgaactggacggttctgtggtggactaattaaagacataaagaggaaagcgccattttttgccagtgatttttatgatgctttaaatattcaagctctttcggcaattctcttcatttatctggcaactgtaactaatgctatcacttttggaggactgcttggggatgccactgacaacatgcagggcgtgttggagagtttcctgggcactgctgtctctggagccatcttttgcctttttgctggtcaaccactcactattctgagcagcaccggacctgtcctagtttttgagaggcttctatttaatttcagcaaggacaataattttgactatttggaatttcgcctttggattggcctgtggtccgccttcctatgtctcattttggtagccactgatgccagcttcttggttcaatacttcacacgtttcacggaggagggcttttcctctctgattagcttcatctttatctatgatgctttcaagaagatgatcaagcttgcagattactaccccatcaactccaacttcaaagtgggctacaacactctcttttcctgtacctgtgtgccacctgacccagctaatatctcaatatctaatgacaccacactggccccagagtatttgccaactatgtcttctactgacatgtaccataatactacctttgactgggcatttttgtcgaagaaggagtgttcaaaatacggaggaaacctcgtcgggaacaactgtaattttgttcctgatatcacactcatgtcttttatcctcttcttgggaacctacacctcttccatggctctgaaaaaattcaaaactagtccttattttccaaccacagcaagaaaactgatcagtgattttgccattatcttgtccattctcatcttttgtgtaatagatgccctagtaggcgtggacaccccaaaactaattgtgccaagtgagttcaagccaacaagtccaaaccgaggttggttcgttccaccgtttggagaaaacccctggtgggtgtgccttgctgctgctatcccggctttgttggtcactatactgattttcatggaccaacaaattacagctgtgattgtaaacaggaaagaacataaactcaagaaaggagcagggtatcacttggatctcttttgggtggccatcctcatggttatatgctccctcatggctcttccgtggtatgtagctgctacggtcatctccattgctcacatcgacagtttgaagatggagacagagacttctgcacctggagaacaaccaaagtttctaggagtgagggaacaaagagtcactggaacccttgtgtttattctgactggtctgtcagtctttatggctcccatcttgaagtttatacccatgcctgtactctatggtgtgttcctgtatatgggagtagcatcccttaatggtgtgcagttcatggatcgtctgaagctgcttctgatgcctctgaagcatcagcctgacttcatctacctgcgtcatgttcctctgcgcagagtccacctgttcactttcctgcaggtgttgtgtctggccctgctttggatcctcaagtcaacggtggctgctatcatttttccagtaatgatcttggcacttgtagctgtcagaaaaggcatggactacctcttctcccagcatgacctcagcttcctggatgatgtcattccagaaaaggacaagaaaaagaaggaggatgagaagaaaaagaaaaagaagaagggaagtctggacagtgacaatgatgattctgactgcccatactcagaaaaagttccaagtattaaaattccaatggacatcatggaacagcaacctttcctaagcgatagcaaaccttctgacagagaaagatcaccaacattccttgaacgccacacatcatgctgaaattcctttccttcagtcactcggtatgccaagtcctcctagaactccagtaaaagttgtgcctcaaattagaatagaacttgaacctgaagacaatgattatttctggaggagcaagggaacagaaactacattgtaacctgtttgtctttcttaaaactgacatttgttgttaatgtcatttgtttttgtttggctgtttgtttattttttaacttttatttcgtctcagtttttggtcacaggccaaataatacagcgctctctctgcttctctcttgcatagatacaatcaagacaatagtgcaccgttccttaaaaacagcatctgaggaatcccccttttgttcttaaactttcagatgtgtcctttgataaccaaattctgtcactcaagacacagacacccacagaccctgtcctttgcctctattaagcagaggatggaagtattaaggattttgtaacaccttttatgaaaatgttgaaggaacttaaaactttagctttggagctgtgcttactggcttgtctttgtctggtagaacaaaccttgacctccagacagagtcccttctcacttatagagctctccaggactggaaaaagtgctgctattttaacttgctcttgcttgtaaatcctaatcttagagttatcaaaagaagaaaaaactgaaggtactttactccctatagagaaaccattgccatcattgtagcaagtgctggaatgtcccttttttcctatgcaactttttttaaccctttaatgaacttatctgttgagtacattgaagaatatttttcttcctagattttgttgtttaaattatggggcctaacctgccacttattttttgtcaatttttaaaacttttttttaattactgtaaagaaaatgaattttttcctgcagcaggaaacataattttga

SEQ ID NO: 604 - protein, 1079 aa, Homo sapiens [sequence omitted]

SEQ ID NO: 605 - DNA, 793 bp, Homo sapiens
aaaggatcaagcatccctgagtttcaaacagaaacttgcactgaatacattcaaagaaccatcaagaaatggggacctggattttatttgcctgcctcctgggagcagcttttgccatgcctctaccacctcatcctgggcaccctggttatatcaacttcagctatgaggtgcttacccctttgaagtggtaccagagcataaggccaccgtacccttcctatggttacgagcccatgggtggatggctgcaccaccaaatcatccccgtgctgtcccaacagcaccccccgactcacaccctgcagcctcatcaccacatcccagtggtgccagctcagcagcccgtgatcccccagcaaccaatgatgcccgttcctggccaacactccatgactccaatccaacaccaccagccaaacctccctccgcccgcccagcagccctaccagccccagcctgttcagccacagcctcaccagcccatgcagccccagccacctgtgcaccccatgcagcccctgccgccacagccacctctgcctccgatgttccccatgcagcccctgcctcccatgcttcctgatctgactctggaagcttggccatcaacagacaagaccaagcgggaggaagtggattaaaagatcagaagatgagaggggaatgaatacttcagatgctttcaggagtgacacaagaacacaatgatttttgcttataatcactttacttagcaaattctgtaactaaaaaagtaccattagcagacaataaaatgcattaaaaatca

SEQ ID NO: 606 - protein, 191 aa, Homo sapiens
MGTWILFACLLGAAFAMPLPPHPGHPGYINFSYEVLTPLKWYQSIRPPYPSYGYEPMGGWLHHQIIPVLSQQHPPTHTLQPHHHIPVVPAQQPVIPQQPMMPVPGQHSMTPIQHHQPNLPPPAQQPYQPQPVQPQPHQPMQPQPPVHPMQPLPPQPPLPPMFPMQPLPPMLPDLTLEAWPSTDKTKREEVD

SEQ ID NO: 607 - DNA, 2150 bp, Homo sapiens
ctcgagccacgaaggccccgctgtcctgtctagcagatacttgcacggtttacagaaattcggtccctgggtcgtgtcaggaaactggaaaaaaggtcataagcatgaagcgcagttcagtttccagcggtggtgctggccgcctctccatgcaggagttaagatcccaggatgtaaataaacaaggcctctatacccctcaaaccaaagagaaaccaacctttggaaagttgagtataaacaaaccgacatctgaaagaaaagtctcgctatttggcaaaagaactagtggacatggatcccggaatagtcaacttggtatattttccagttctgagaaaatcaaggacccgagaccacttaatgacaaagcattcattcagcagtgtattcgacaactctgtgagtttcttacagaaaatggttatgcacataatgtgtccatgaaatctctacaagctccctctgttaaagacttcctgaagatcttcacatttctttatggcttcctgtgcccctcatacgaacttcctgacacaaagtttgaagaagaggttccaagaatctttaaagaccttgggtatccttttgcactatccaaaagctccatgtacacagtgggggctcctcatacatggcctcacattgtggcagccttagtttggctaatagactgcatcaagatacatactgccatgaaagaaagctcacctttatttgatgatgggcagccttggggagaagaaactgaagatggaattatgcataataagttgtttttggactacaccataaaatgctatgagagttttatgagtggtgccgacagctttgatgagatgaatgcagagctgcagtcaaaactgaaggatttatttaatgtggatgcttttaagctggaatcattagaagcaaaaaacagagcattgaatgaacagattgcaagattggaacaagaaagagaaaaagaaccgaatcgtctagagtcgttgagaaaactgaaggcttccttacaaggagatgttcaaaagtatcaggcatacatgagcaatttggagtctcattcagccattcttgaccagaaattaaatggtctcaatgaggaaattgctagagtagaactagaatgtgaaacaataaaacaggagaacactcgactacagaatatcattgacaaccagaagtactcagttgcagacattgagcgaataaatcatgaaagaaatgaattgcagcagactattaataaattaaccaaggacctggaagctgaacaacagaagttgtggaatgaggagttaaaatatgccagaggcaaagaagcgattgaaacacaattagcagagtatcacaaattggctagaaaattaaaacttattcctaaaggtgctgagaattccaaaggttatgactttgaaattaagtttaatcccgaggctggtgccaactgccttgtcaaatacagggctcaagtttatgtacctcttaaggaactcctgaatgaaactgaagaagaaattaataaagccctaaataaaaaaatgggtttggaggatactttagaacaattgaatgcaatgataacagaaagcaagagaagtgtgagaactctgaaagaagaagttcaaaagctggatgatctttaccaacaaaaaattaaggaagcagaggaagaggatgaaaaatgtgccagtgagcttgagtccttggagaaacacaagcacctgctagaaagtactgttaaccaggggctcagtgaagctatgaatgaattagatgctgttcagcgggaataccaactagttgtgcaaaccacgactgaagaaagacgaaaagtgggaaataacttgcaacgtctgttagagatggttgctacacatgttgggtctgtagagaaacatcttgaggagcagattgctaaagttgatagagaatatgaagaatgcatgtcagaagatctctcggaaaatattaaagagattagagataagtatgagaagaaagctactctaattaagtcttctgaagaatgaagataaaatgttgatcatgtatatatatccatagtgaataaaattgtctcagtaaaaaaaaaaaaaaaaaaaaaaaaaaaaaaaaaaaaaaaaaaaaaaaaaaaaaaaaaaaaaaaa

SEQ ID NO: 608 - protein, 642 aa, Homo sapiens
MKRSSVSSGGAGRLSMQELRSQDVNKQGLYTPQTKEKPTFGKLSINKPTSERKVSLFGKRTSGHGSRNSQLGIFSSSEKIKDPRPLNDKAFIQQCIRQLCEFLTENGYAHNVSMKSLQAPSVKDFLKIFTFLYGFLCPSYELPDTKFEEEVPRIFKDLGYPFALSKSSMYTVGAPHTWPHIVAALVWLIDCIKIHTAMKESSPLFDDGQPWGEETEDGIMHNKLFLDYTIKCYESFMSGADSFDEMNAELQSKLKDLFNVDAFKLESLEAKNRALNEQIARLEQEREKEPNRLESLRKLKASLQGDVQKYQAYMSNLESHSAILDQKLNGLNEEIARVELECETIKQENTRLQNIIDNQKYSVADIERINHERNELQQTINKLTKDLEAEQQKLWNEELKYARGKEAIETQLAEYHKLARKLKLIPKGAENSKGYDFEIKFNPEAGANCLVKYRAQVYVPLKELLNETEEEINKALNKKMGLEDTLEQLNAMITESKRSVRTLKEEVQKLDDLYQQKIKEAEEEDEKCASELESLEKHKHLLESTVNQGLSEAMNELDAVQREYQLVVQTTTEERRKVGNNLQRLLEMVATHVGSVEKHLEEQIAKVDREYEECMSEDLSENIKEIRDKYEKKATLIKSSEE

SEQ ID NO: 609 - DNA, 4485 bp, Homo sapiens
cgcgggcggcgcggaagcggcggcggcgcggccggggcagccatgtcgccattgtctgcggcgcgggcggccctgcgggtctacgcggtaggcgccgcggtgatcctggcgcagctgctgcggcgctgccgcgggggcttcctggagccaggtccccacgcatgagcagccgtccagcaggcaggctccggtggagaagcaatggagaataaaagcctggagagctcccagacagacctgaagctggtggcccacccccgcgccaagagcaaggtgtggaagtatttcggcttcgacaccaacgccgagggatgcatcctgcagtggaagaaaatctactgccgcatctgcatggcccagatcgcctactccggaaacacctccaacctgtcctaccacctggagaagaaccaccccgaggaattctgcgagttcgtcaagagcaacacggagcagatgcgtgaagccttcgccaccgccttctccaagctgaagcccgagtcgtcccagcagcccgggcaggacgcgctggccgtcaaggccggccacggctacgacagcaagaagcagcaggagctgacggccgccgtgctgggcctcatctgcgaggggctgtacccagcctccatcgtggacgagcccaccttcaaggtgctgctgaagacggccgacccccggtatgagctgcccagccggaagtacatctctaccaaggccatccctgagaagtacggggccgtccgggaggtgatcctgaaggagctggccgaggccacctggtgtggcatctccaccgacatgtggaggagtgagaatcagaaccgcgcctacgtcacgctggccgcccacttcctgggcctgggcgcccccaactgcctgtccatgggctcccgctgcctgaagaccttcgaggtgcccgaagagaacacggcggagaccatcacgcgagtgctctatgaggtcttcatcgagtggggcatcagcgccaaggtcttcggggccaccaccaactatggcaaggacatcgtgaaggcgtgctccctgctggacgtcgcagtgcacatgccctgcctgggccacaccttcaatgccggcatccagcaggccttccagctcccgaagctgggggcgctgctgtcgcgctgccgcaaactggtggagtacttccagcagtctgccgtggccatgtacatgctctatgagaagcagaagcagcagaacgtggcccactgcatgctggtgagcaaccgcgtctcctggtgggggagcacgctggccatgctgcagcgcctcaaggagcagcagttcgtcatcgccggggtcttggtggaggacagcaacaaccaccacctcatgctggaggccagcgagtgggccaccatcgaggggctggtggagctcctgcagcccttcaagcaggtggccgagatgctgtcggcctccaggtaccccaccatcagcatggtgaagccgctgctgcacatgctcctgaacaccacgctcaacatcaaggagaccgactccaaggagctcagcatggccaaggaggtcatcgccaaggagctttccaagacctaccaggagacgcccgagatcgacatgtttctcaacgtggccaccttcctggacccccgctacaagaggctgcccttcctctccgccttcgagcggcagcaggtggagaatcgcgtggtggaagaggccaagggcctgctggacaaggtcaaagacggcggctaccggccggctgaggacaagatcttcccggtgcccgaggagcctcccgtcaagaagctcatgcggacatccacgccgccgcccgccagcgtcatcaacaacatgctggccgagatcttctgccagacaggcggcgtggaggaccaggaagagtggcatgcccaggtggtggaggagctgagcaacttcaagtcccagaaggtgcttggcctcaacgaagaccccctcaagtggtggtcagaccgcctggccctcttccccctgctgcccaaggtgctgcagaagtactggtgcgtgacggccacgcgcgtcgcccctgagcgtctcttcggatccgccgccaacgtggtcagcgccaagaggaaccggctggctcccgcgcacgtggacgagcaggtgtttctgtatgagaacgcccggagtggggcagaggcggaacccgaggaccaggacgagggggagtggggcctggaccaggagcaggtgttctccttgggggatggcgtcagcggcggtttctttggcattagggacagcagcttcctgtagcgaggaagcgtgttgtcttacaagtcatccccgcagcagcccattggatgctttgctgtaaatacttacccggtcagcttggttttgaacctcagagaccatccactgtctttgacacctagaaggtggaaaaaggaaagagattcgagaagtgagagagggtcgggggcggtggctcctgtctataatcgcagcactttgggaggccgaggtgggcagatcagctgaggtcaggagatcgagaccagcctggccaacatggcgaaaccccgtctctactaaaaatacaaaaattagccaggactgatggcatgtgcctgtaatcccagcttctggaggctgaggccagagaatcgcttgaacctgggaggtggaggttgcagtaagctgagatcgctgcactccagcctgggcgacaagagcgagactctctcaaaaagaaaaaagaagacacaagagaggtggctttgagtgggtttcctttcctcccctattcccggggcccggacgacttctgcttgggaactgccaacgcttctgcttgggaattgcgtgcagcagagcctagaggagctgttccttccttcacagatacttaagacctccaccatgtctgattcgagttctccctgggagggtttagaagaaacgcaggaacattctgggtggcgtcgaaggagcctttcccgatcatcatgtgtgacttctgcgaggtccagatcactgaattcatgtttacattctcgtgcaagcagggacctcttgcttctgagaaatggggaagagaccttttagccaaaatgcccttcttaaaaagagagacctttttttttaatgttcggttaaaaatgtgacagatgagtagaaaaatgcagacacttaacaaaaagcaaacagaaaaaaaagtgtggaatgtgttgtattttcgacaggttgctgccagagagcctgcttcctgctgcctgccgaaatttcactttgcggagttggtccttaaaactgggcggtggccgggcgtggtggctcacgctgaggtcaggagttcgagaccagcctggccaaccaacatggtgaaacctcgtgtctactaaaaatacaagaaactagccagatgcggtggcacccgcctgtaatcccagctactcgggaggctgaggcggaagattcgcttgagcccaggaggtggaggttgcagtgagccaagactacgccactgcactccagcctggaggccagagtgagactccgtctcaaaacaaaacaaaagtgggtggctcactggtccggaggttatgtcttcggtgtctcagccctaaaagtccagttcccccgtgcggccagcttttccacataaggtgtttttgatttgattaccggaaaggactcttgattcttctcttttaaactgaataccataggggaaatgaattttaaaatattgcccccggaggggttttccgtggctggattcctgcgagttgctttcagtcattcagggaaacagaaagacgttttccaacatgtagaactgctttttaactggaggaaaaatacttcaggaggcttagcatattgcttggattctacgtgcagcgggttctctgcctccgtgaagacaagctgggctggggaggacggtgtctaggagggatgaccccactcagctccaggcagtgttctgccgagaccccaagaactcggggtgtcagagggcaaaggaactacctgcctttcacggctgctgacttctcagggctgcaagcagcacagaatgttatccttacgtcctgagccggtttaagtctgtggaaaaggaagcacgggagaaatccacgtaacctttgctttctttttaagggaagcggttccgccgtgaacttggaaccctcagctccgggtgttctcggcagaagggcagctggaagggacacagtggggcaggctttggggttgctccctgttctgccccgaggccggggacgcagggcagcccacgcctccgtgggctccattctgtagcattgccagcgttctcttcacgtctctaacaatcctttgcttttcctcactcacgtggaaatgtgaactgtcccggctctgtcttcatttttatttttaagccatcgttcccctcctgaacggttgccccttatttaatgctgtaaagttggactgttgttcaataaaccagagcaatgc

SEQ ID NO: 610 - protein, 694 aa, Homo sapiens
MENKSLESSQTDLKLVAHPRAKSKVWKYFGFDTNAEGCILQWKKIYCRICMAQIAYSGNTSNLSYHLEKNHPEEFCEFVKSNTEQMREAFATAFSKLKPESSQQPGQDALAVKAGHGYDSKKQQELTAAVLGLICEGLYPASIVDEPTFKVLLKTADPRYELPSRKYISTKAIPEKYGAVREVILKELAEATWCGISTDMWRSENQNRAYVTLAAHFLGLGAPNCLSMGSRCLKTFEVPEENTAETITRVLYEVFIEWGISAKVFGATTNYGKDIVKACSLLDVAVHMPCLGHTFNAGIQQAFQLPKLGALLSRCRKLVEYFQQSAVAMYMLYEKQKQQNVAHCMLVSNRVSWWGSTLAMLQRLKEQQFVIAGVLVEDSNNHHLMLEASEWATIEGLVELLQPFKQVAEMLSASRYPTISMVKPLLHMLLNTTLNIKETDSKELSMAKEVIAKELSKTYQETPEIDMFLNVATFLDPRYKRLPFLSAFERQQVENRVVEEAKGLLDKVKDGGYRPAEDKIFPVPEEPPVKKLMRTSTPPPASVINNMLAEIFCQTGGVEDQEEWHAQVVEELSNFKSQKVLGLNEDPLKWWSDRLALFPLLPKVLQKYWCVTATRVAPERLFGSAANVVSAKRNRLAPAHVDEQVFLYENARSGAEAEPEDQDEGEWGLDQEQVFSLGDGVSGGFFGIRDSSFL

SEQ ID NO: 611 - DNA, 3642 bp, Homo sapiens
ggcacgagctttggctggctagggaggggatgcaatgatataaacatttatcccctgatacctcatgttaaaatctgatgcccactgtgggacgtggggcctaatggccaccatttgggtcatggtgaccaatcttttatgaatagagagatactgccctctcttgggaatgaatgaattgttgctttattattttccaagagagctagttgttaaaaagaccctggcaacttcctactctctctgttcctctgttaccatgtgttctctgcatataccagctcacctttgtcttctgccatgagtggaagcagcctgaggccctcactaaatgcgcaaacatttccagacatcagaatcttgagccacatgaaccttgtttatataaattagtcagtctcagacatttctttatagcaacacaaaatggaaaaagataacactcgcatcacaggtatgtgtctctggcagctagccaccgttcttaagatatccaggatccactcagccaagagtcttctcatcagtactctaaagacacttatcactcaagagagtctaaggtttttaggagaaaccagggacaaagtctaaatgtttttgtgataactcagattgcccacttttctttgaccacatatcttttacaggaaaaaggattgtaacagtaaagaggtattggcatattatcagagtctcatccattcattcaaaattaggccagtttatcatcctcttgtatgaatatgtctcccagaatgaaatcactcagctttgctgacaacactcaatcttaccaggttccaaaaacaagaatggtctcagggacatacagcttcactcttttaggcatccagtataattgacctaagtgacaatatcttctcttgctcacaccacctttgaggagttaagctaatattgaatttttctcattatataaccctttgatttattcacttgccctcagccactattcctccctctgtccctttatatcagttgtttccaggtttgggagtgacattaggtttgtctgctgggctggcctagactgcaggcagcaatagtattctagcatgtcttccctcagtctagtcttgatcatagagggtaggttatataggtaaggaactagtgggggctatcaagaccaccaggctatataactctacttactgttaatcctaacttttccagatgaaatgaatacttgagaattcttacataaaggtataaaaatatagttatggtttttggcttagggataattcctgtttctggcacttttatttacatccctattcctggtactatggcataacatatgaaaaaataaatttgaggtgaagtgtagtctttattccagcatcctctcctcttcagaagaattgtatgtatcgtcataacagcatcgtcctgatccatcaggtaaaagagaggatgctacctagtggagttattcttgcagccccactcatgttgacagcgagcacattcatgaagatataaaagccagtccttcatgtttatattgcccaacaattagattggcagtttttagacaaacaatgtttcaattgaccatttcaattttctatcaaattttcccctgaggaggacatgtccctctgcattgttggccatttgaggctgtaaagtgtgttttcttgtgtaaagaagtgtgactcggcagtccaaattggtgcaatctcttcttttctggttcttgtatagcccttgaagcattgacatctacccctggttgagcatagcccaatccagagtcagtgattttcctgtcaagatccattggcagctcctttggggttgctggcatcattctggcttgccaggtattatgatcaaagccttcccactagagaatctgtcacatctccatctgctgcctctgtctgttttcttgaccaacagtgaaaaaagagattatgagaaataagataaattaccaaaattgtgaacaaaagagagattatcactaatgacccttaggaagttaaaaaacattataagtgaatactctgaaaaacctgaagccaataagttagaccacttggataaaaaggaccaattcgtgcagagatagaaattgccaaaactgacccaaattaactggaaaacctgaagagaactgtgaactaagtcagaaattgaaaaaccttctcaaaaagaaatgccaaagcccagatatcttcactggtgaattctatcaaatattttgaaagctctttcagacaagaagagaggagggaagactttccagcccatttacagaactggcattaccctcatatcaaagtcacagcaagactcacaggaaaagagtgccatacaccagtgtcaccaataaacataaatgaaaacatccttaacaaacattggcagataatacaaagccacataaaaaaggattacactccatgaccaatgggattcatcccaggaacatatggttggattaacatttgaaaatcagttcatggaatgcactgtattaatggaaaaaaagacataattatctcaaaagatgcaggagaaacagttgacaaaaatgttaacatcactcatgttcataagtttcaacaaaataggaatggaggagaccttcttcactctgataaagggcgtctataaaaaacccacagctaaaatcaaacttaatgaagaaagactgaagactgaatgcttttctcctaagatggggatcaatgcaaggatgtccaatcccaccacttttatttaatattatactggagattgtatccagtgcaataaggcagaaaattaaaaattaaaggcatccagataaaaaggaaaacatacaattctattcacagataacatgaccctgtctgtagaattcacaagcagataaaaactggctagcactaataaatgaatccagaagggcccataggatatcaaatcaatataaaaattaattattaacatatttctctatagaagcaatgaaaatctcaactttcctatcacagtagttaccagaagagcgaaataggaataaatttaggaagacagcagtgtttgttcactgaaaataaaaaaacattcctcagagaaattaaaggtctaaataaatggagagatgcgagttggaaagctcgataatactgttaagatggcagttctcccccagtagatctataggttcaacacaatccctatcaaaatcccagcaggattttatagaaaattgacaaaataggccgggcgcggtggctcatgccggtaatcccagcactttgggaggctgaggcgggcggatcatgagatcaggagatccagaccatcctggctaacacggtgaaaccccgtctctactaaaaatacaaaaaattagccgggcgtggtggcaggctcctcgggaggctgaggcagaaaaatggcatgaacccggtaggcagaagttgcagtgagcggagatcgtgccactgcactccagcctgggtgacagagcgagactccgtctcaaaaaaaaaaaaaaaaaaaaagaaaagaaaaaaagaaaagaaaattgacaaaataatcctaaaaatgtatatgaaaatgcagaggatgcagaagggccaacacaaatttggaaaaaaaaaaaaaaaaaaa

SEQ ID NO: 612 - DNA, 2608 bp, Homo sapiens
agctcgccggcctttggtctccaggacttgtcccagcagcccctcgaactgagaattacaccatcggacccctggctctgaggccttcagacttggactgtgtcacactgccaggcttccagggctccaacttgcagacggcctgttgtgggacagtctctgtaatcgcgaaagcaaccatggaagacctgggggaaaacaccatggttttatccaccctgagatctttgaacaacttcatctctcagcgtgtggagggaggctctggactggatatttctacctcggccccaggttctctgcagatgcagtaccagcagagcatgcagctggaggaaagagcagagcagatccgttcgaagtcccacctcatccaggtggagcgggagaaaatgcagatggagctgagtcacaagagggctcgagtggagctggagagagcagccagcaccagtgccaggaactacgagcgtgaggtcgaccgcaaccaggagctcctgacgcgcatccggcagcttcaggagcgggaggccggggcggaggagaagatgcaggagcagctggagcgcaacaggcagtgtcagcagaacttggatgctgccagcaagaggctgcgtgagaaagaggacagtctggcccaggctggcgagaccatcaacgcactgaaggggaggatctcggaactgcagtggagcgtgatggaccaggagatgcgggtgaagcgcctggagtcggagaagcaggacgtgcaggagcagctggacctgcaacacaaaaaatgccaggaagccaatcagaaaatccaggaactccaggccagccaagaagcaagagcagaccacgagcagcagattaaggatctggagcagaagctgtccctgcaagagcaggatgcagcgattgtgaagaacatgaagtctgagctggtacggctccctaggctggaacgggagctggagcagctgcgggaggagagcgcactgcgggagatgagagagaccaacgggctgctccaggaagagctggaagggctgcagaggaagctggggcgccaggagaagatgcaggagacgctggttggcttggagctggagaacgagaggctgctggccaagctgcaaagctgggagagactggaccagaccatgggcctgagcatcaggactccagaagacctttccagattcgtggttgagctgcagcagagggagcttgccttgaaggacaagaacagcgccgtcaccagcagcgcccgggggctggagaaggccaggcagcagctgcaggaggagctccggcaggtcagcggccagctgttggaggagaggaagaagcgcgagacccacgaggcgctggcccggaggctccagaaacgggtcctgctgctcaccaaggagcgggacggtatgcgggccatcctggggtcctacgacagcgagctgaccccggccgagtactcaccccagctgacgcggcgcatgcgggaggctgaggatatggtgcagaaggtgcacagccacagcgccgagatggaggctcagctgtcgcaggccctggaggagctgggaggccagaaacaaagagcagacatgctggagatggagctgaagatgctgaagtctcagtccagctctgccgaacagagcttcctgttctccagggaggaggcggacacgctcaggttgaaggtcgaggagctggaaggcgagcggagtcggctggaggaggaaaagaggatgctggaggcacagctggagcggcgagctctgcagggtgactatgaccagagcaggaccaaagtgctgcacatgagcctgaaccccaccagtgtggccaggcagcgcctgcgcgaggaccacagccagctgcaggcggagtgcgagcgactgcgcgggctcctgcgcgccatggagagaggaggcaccgtcccagccgaccttgaggctgccgccgcgagtctgccatcgtccaaggaggtggcagagctgaagaagcaggtggagagtgccgagctgaagaaccagcggctcaaggaggttttccagaccaagatccaggagttccgcaaggcctgctacacgctcaccggctaccagatcgacatcaccacggagaaccagtaccggctgacctcgctgtacgccgagcacccaggcgactgctcatcttcaaggccaccagcccctcgggttccaagatgcagctactggagacagagttctcacacaccgtgggcgagctcatcgaggtgcacctgcggcgccaggacagcatccctgccttcctcagctcgctcaccctcgagctcttcagccgccagaccgtggcgtagcctgcaggctcgggggcatagccggagccactctgcttggcctgacctgcaggtcccctgccccgccagccacaggctgggtgcacgtcctgcctctccagccccacagggcagcagcatgactgacagacacgctgggacctacgtcgggcttcctgctggggcggccagcaccctctccacgtgcagaccccatgcgtcccggagcctggtgtgtgggcgtcggccaccagcctgggttcctcaccttgtgaaataaaatcttctcccctaaaa

SEQ ID NO: 613 - protein, 803 aa, Homo sapiens
MEDLGENTMVLSTLRSLNNFISQRVEGGSGLDISTSAPGSLQMQYQQSMQLEERAEQIRSKSHLIQVEREKMQMELSHKRARVELERAASTSARNYEREVDRNQELLTRIRQLQEREAGAEEKMQEQLERNRQCQQNLDAASKRLREKEDSLAQAGETINALKGRISELQWSVMDQEMRVKRLESEKQDVQEQLDLQHKKCQEANQKIQELQASQEARADHEQQIKDLEQKLSLQEQDAAIVKNMKSELVRLPRLERELEQLREESALREMRETNGLLQEELEGLQRKLGRQEKMQETLVGLELENERLLAKLQSWERLDQTMGLSIRTPEDLSRFVVELQQRELALKDKNSAVTSSARGLEKARQQLQEELRQVSGQLLEERKKRETHEALARRLQKRVLLLTKERDGMRAILGSYDSELTPAEYSPQLTRRMREAEDMVQKVHSHSAEMEAQLSQALEELGGQKQRADMLEMELKMLKSQSSSAEQSFLFSREEADTLRLKVEELEGERSRLEEEKRMLEAQLERRALQGDYDQSRTKVLHMSLNPTSVARQRLREDHSQLQAECERLRGLLRAMERGGTVPADLEAAAASLPSSKEVAELKKQVESAELKNQRLKEVFQTKIQEFRKACYTLTGYQIDITTENQYRLTSLYAEHPGDCSSSRPPAPRVPRCSYWRQSSHTPWASSSRCTCGARTASLPSSARSPSSSSAARPWRSLQARGHSRSHSAWPDLQVPCPASHRLGARPASPAPQGSSMTDRHAGTYVGLPAGAASTLSTCRPHASRSLVCGRRPPAWVPHLVK

SEQ ID NO: 614 - DNA, 9416 bp, Homo sapiens
aagcgcgccgcctccccgccctctctcactccccgctcctctccgccgcgcactctcgcggcgctgggagagggcggagggggaggcggcgcgcggcgccagaggaggggggacgcagggggcggagcggagacagtaccttcggagataatcctttctcctgccgcagtggagaggagcggccggagcgagacacttcgccgaggcacagcagccggcaggatggcgaccgtggtggtggaagccaccgagccggagccgtccggcagcatcgccaacccggcggcgtccacctcgcctagcctgtcgcaccgcttccttgacagcaagttctacttgctggtggtcgtcggcgagatcgtgaccgaggagcacctgcggcgtgccatcggcaacatcgagctcggaatccgatcatgggacacaaacctgattgaatgcaacttggaccaagaactcaaactttttgtatctcgacactctgcaagattctctcctgaagtcccaggacaaaagatccttcatcaccgaagtgacgttttagaaacagtggtcctgatcaacccttctgatgaagcagtcagcaccgaggtgcgcttaatgatcactgatgctgcccgacacaagctgctcgtgctgaccgggcagtgctttgaaaataccggagagctcattctccagtccggctctttctccttccagaacttcatagagattttcaccgatcaagagatcggggagttactaagcaccacccatcctgccaacaaagccagcttaaccctgttctgtcctgaagaaggggactggaagaactccaatcttgacagacacaatctccaagacttcatcaatattaaactcaattcagcttctatcttgccagaaatggaaggactttctgagtttaccgagtatctctcagaatcagtggaagtcccatctccctttgacatcttggaacctcccacatcgggtggatttctgaagctctccaagccctgctgttatatttttccaggagggaggggcgattctgccttgtttgcagtgaatggtttcaatatgctcatcaatggcggatcagagagaaaatcctgcttctggaagctcatccgacacttagaccgagtggactccatcctgctcacccacattggggatgacaatttgcctggaataaacagcatgttacagcggaaaattgcagagctcgaggaagaacagtcccagggctccaccacaaatagtgactggatgaaaaacctcatctcccctgacttaggagttgtatttctcaatgtacctgaaaatctcaaaaatccagagccaaacatcaagatgaagagaagcatagaagaagcctgcttcactctccagtacctaaacaaattgtccatgaaaccagaacctctgtttagaagtgtaggcaatactattgatcctgtcattcttttccaaaaaatgggagtaggtaaacttgagatgtatgtgcttaatccagtcaagagcagcaaggaaatgcagtattttatgcagcagtggactggtaccaacaaagacaaggctgaattcattctgcctaatggtcaagaagtagatctcccgatttcctacttaacttcagtctcatctttgattgtgtggcatccagcaaaccctgcggagaaaatcatccgagtcctgtttcctgggaacagcacccagtacaacatcctggaagggttggaaaagctcaaacatctagactttctgaagcagccactggccacccaaaaggatctcactggccaggtgcccactcctgtggtgaaacaaacaaaactgaaacagagggctgatagccgagaaagtctgaagccagccgcaaaaccacttcctagcaaatccgtgcgcaaggagtcaaaagaagaaacccctgaggtcacaaaagtgaatcacgtggaaaagccacccaaagttgaaagcaaagaaaaggtaatggtgaaaaaagacaagccagtaaaaacagagaccaaaccttcagtgactgaaaaggaggttcccagcaaagaagagccatctccagtgaaagccgaggtggctgagaagcaagccacagatgtcaaacccaaagctgccaaggagaagacggtgaaaaaggaaacaaaggtaaagcctgaagacaagaaagaggagaaagaaaagccaaagaaagaagtggctaaaaaggaggacaaaacacctatcaagaaggaggaaaaaccaaaaaaggaagaggtgaaaaaagaagtcaaaaaagagatcaagaaagaagagaaaaaagaacccaagaaagaggttaagaaagaaacaccgccaaaggaagtcaagaaggaagttaagaaggaagagaagaaggaagtgaaaaaggaagaaaaggaacccaaaaaagaaattaagaagctccctaaagacgcaaagaaatcatctactcctctgtctgaagcaaaaaaaccagctgctttaaaaccaaaagtacccaagaaggaagagtctgtcaagaaagattctgttgctgccggaaagccaaaggagaaggggaaaataaaagtcattaagaaggaaggcaaggccgcagaggctgtcgctgcagctgtcggcactggagccaccacagcagctgtcatggcggcagctggaatagcagccattggccctgccaaagaactcgaagctgagaggtcccttatgtcatctcctgaggatctaaccaaggactttgaagagttaaaggctgaagaggtcgatgtaacaaaggacatcaagcctcagctggagctaatcgaagacgaagagaaactgaaggaaactgagccagtcgaagcctacgtcatccagaaggagagagaagtcaccaaaggtcctgccgagtcccctgatgagggaatcactaccactgaaggggagggcgaatgtgaacagacacctgaggagctggagcccgtcgagaagcagggagtagacgacattgaaaaatttgaagatgaaggagccggttttgaagaatcttcagagactggagactatgaagagaaggcagaaactgaggaggctgaggagccagaagaggatggggaggaacacgtatgtgtgagcgcctccaagcacagccccactgaggatgaggaaagtgccaaggcggaggctgatgcatacatcagggagaagagggagtctgtggccagtggggatgaccgagccgaagaagacatggatgaggccattgagaaaggagaggctgaacaatctgaagaggaggctgatgaggaggacaaagctgaagatgccagagaggaggaatatgagccggaaaaaatggaagctgaagactatgtgatggctgtggtcgacaaggctgcagaggctggtggtgccgaggagcagtatggattcctcaccacaccaaccaagcaactaggagcccagtctcctggccgagaacctgcatcttcaattcatgatgagactttacctggaggctcagagagcgaggccaccgcttctgatgaggagaatcgagaagaccagcctgaggaattcactgccacctctggctacactcagtctactattgagatatccagtgagcccacccccatggatgagatgtctacccctcgagacgtgatgagtgatgagaccaacaatgaagagacggagtccccttctcaggaattcgtaaatatcaccaaatatgaatcttcattgtattctcaggaatactctaaacctgctgatgttacaccgctcaacggattttctgaaggatcaaaaacagatgccactgatggcaaggattacaatgcttcagcctctaccatatcaccaccctcttccatggaggaagacaaattcagcagatctgctttacgtgatgcttactgctctgaagtgaaagccagcaccactttggacatcaaagatagcatctcagctgtttcaagtgaaaaggtcagcccatcgaagagcccgtccctgagtccatctccaccatcacccttagaaaagacccccctgggtgaacgtagtgtgaacttctctctgacgcccaatgagattaaagtctctgcagaggcagaagtagccccggtgtctcctgaggtgacccaagaagtagttgaagaacattgtgctagtcctgaggacaagactctggaagtggtgtcaccatctcagtccgtgactggcagtgctggtcacacaccttactatcaatctcctactgacgagaaatccagtcatctccctacagaagtcattgaaaaaccaccagcagttccagtgagttttgaattcagtgatgccaaagatgagaatgaaagggcttcagtaagccccatggatgagcccgtgcctgactcagagtctcctattgaaaaagttttgtctcctttacgcagcccgcccctcattggatccgagtctgcttatgaaagttttctaagtgctgatgacaaggcttctggcagaggtgccgaaagtccttttgaagaaaagagtggaaaacaaggctctccagaccaagtaagtccagtttctgaaatgacttctactagtctttaccaagacaaacaggaagggaaaagcacagactttgcaccaataaaagaagactttggccaagaaaagaaaactgatgatgttgaagccatgagttctcaaccagcactggctctggatgaaaggaaattaggagatgtttctcccacacaaatagatgtcagtcagtttggatcttttaaagaagacactaagatgtccatttctgaaggtactgtctcagacaagtcagctactcctgttgatgagggcgtagcagaagacacgtactctcatatggagggtgtggcctcagtgtccacagcctcagtggctacgagctcatttccagagccaacaacagatgatgtgtctccatctctgcatgctgaggttggctccccacattccacagaagtagatgactccctttcagtgtctgttgtgcaaacacctaccacattccaggaaacagaaatgtctccatctaaagaagaatgcccaagaccgatgtcaatttctccaccagatttctcccctaaaactgcaaagtccaggacacccgttcaagatcacagatctgaacagtcctcaatgtctattgaatttggccaagaatctcctgagcaatcccttgctatggacttcagtcgacagtctccagatcaccctacagtgggtgcaggcgtgcttcacatcactgaaaatgggccaactgaagtggactacagtccttctgacatgcaggactccagtttatcacataagataccacctatggaggagccgtcctacacccaagataatgatctttctgagctcatctcagtatctcaggtagaggcctccccgtccacctcttctgctcataccccttctcagatcgcttctcctctccaagaagatactctatccgatgttgctcctcccagagatatgtccttatatgcctcactcacctctgaaaaagtgcaaagtctggaaggagagaagctctctccaaaatctgatatctctccactcaccccacgagagtcctctcctttatattcacctactttttcagattctacctctgcagtcaaagagaaaacagcaacttgccacagttcctcttctccaccaatagatgcagcatccgcagagccctatggcttccgtgcctcagtgttattcgatacaatgcaacaccatctagccttgaatagagatttgtccacacctggcctggagaaggacagtggagggaagacacctggtgactttagctatgcctatcaaaagcctgaggaaacaaccaggtccccagatgaagaagattatgactatgagtcttatgagaagaccacccggacctcagatgtgggtggctattactatgagaagatagagagaaccacaaaatctccaagtgacagtggctactcctatgagaccattgggaaaactaccaagacccctgaagatggtgactattcctatgaaattattgagaagaccacacggacccctgaagagggtgggtactcatatgacataagtgaaaagaccaccagcccccccgaagtgagtggttacagctatgaaaagactgagaggtctagaaggcttctggatgacatcagcaatggctatgatgactctgaggatggtggccacacacttggggaccccagctactcttatgaaaccactgagaaaattaccagtttccctgagtctgaaggttattcctatgagacatctacaaagacaacacgaacccctgatacttccacatactgttacgagactgcagagaaaatcactagaacccctcaggcatccacatattcctacgagacttcagacctatgctacactgcagaaaagaagtccccctcagaagcccgtcaggatgtcgatttatgcctcgtgtcctcttgtgaatacaagcaccccaagacagagctttcaccctctttcattaatcccaatcctcttgagtggtttgccagtgaagaacccactgaagaatctgaaaagcccctcactcaatcagggggagccccaccgcctccaggaggaaagcaacagggccgacagtgtgatgaaacccctcccacctcagtcagcgagtcagccccatcccagaccgactctgatgttcccccggagactgaagagtgcccctccatcacggccgatgccaatatcgactctgaagacgagtcggaaaccatccccacagacaaaactgtcacgtacaaacacatggacccacctccagctcccgtgcaagaccgcagcccttcgccacgccaccctgatgtgtccatggtggacccagaggccttggccattgagcagaacctgggcaaagctctaaagaaagatctgaaagagaagaccaaaaccaaaaagccaggtacaaagaccaagtcatcttcacctgtcaaaaagagtgatgggaagtctaagcccttggcagcttcaccaaaaccagcgggcttgaaagaatcctcggataaagtgtccagggtggcttctcctaagaagaaagaatctgtggaaaaggcagcaaaacccaccaccactcctgaggtcaaagctgcacgtggggaagagaaagacaaggagaccaagaatgctgccaatgcctctgcatccaagtcggccaagaccgccactgcaggaccaggaactaccaagacgaccaagtcatctgctgtgcccccaggcctccctgtgtatttggacctgtgctacattcctaaccacagcaatagtaagaatgttgatgtggaatttttcaagagagtgcggtcttcctactacgtggtgagtgggaatgaccctgctgctgaggagcccagccgggctgtcctggacgctttgttggaaggaaaggctcagtggggcagcaacatgcaggtgacactgatcccaactcatgactcagaagtgatgagggaatggtaccaggagacccatgagaaacagcaagatctcaacatcatggttttagcaagcagcagcacagtggttatgcaagatgaatccttccctgcatgcaagattgaactgtaaaaaccaaggccagccacaccacaggatctgaactttgtttccagaaattcttcaatttgaaatcaccttttctaaaaagtcaattcatctagttaagtcgctgaacaattacctgccaaatgctatactgtgtcatggtgatgcaagtcactaaatttctcagtttttgctgattgctaagggaaataacagtatttccacaatagggttcaaattcctgcaaaattacctaccccagttcatctctgctgaacatttggaaaccatgcactagccaacccaactgacttctgctaggtagaggcatttgtcttagagagagagagagcgcgggagagagtgagagagagtgagagcacaaagataacgcaggagagagagagagaaagaatgagaaagaaaaggaatgcaagagaaggagatgtaatgacagagagttctggtgagatacccagagagaaaaagagagagcagggtggggtaaggaggagaaaataaaccaacaattaggtctgcattttctcaggcagtaggcattctttagtctacataggcaaagttttccatttttgtcagtctgagtcatcaaaaagagtcttaattttctaaaacaagttggctagaagaaagtaaaaagaacaacacttgttatgagggcatgtgatattttcacatcttaattaagctccttcagtttgaaggctgcacactgacataatgtagtgagtgtagactggccatgcaagtggtttgggccccattcagaactctcagactctaaacacacaagtagattgatctaaggcatgctcccagcatttgtccacccacttagtccactctgagtcgattaacctgcatgcagcaacacccaagtccaccccaattaactgaagcaaataccaaagcagttgggagtacatatggtagacaatttgccttaggaagtgacttgaatgtacaaagatacttgatgcacttattttttaatgtgagacagcaagtttataaaacatccatataggattatagatacttaaaggaacacgtgggtgagcgtgtgtgggggtactagaagctgatctgattggtccaacagtttgatgctgagtcatgcgtgttgaatcccacttcagtgcacctgtggcctctcagtcaaacaagttgtgcctttcacagcttctttactactgcaagttcaagactgaaatggcttctatgatcagaactgggaaaacagtgaatcttatggtggaagaggttctcagcaagtgtacagtatttaccttcctttgtcttacattggctttttaaattttccattaatttcaacataattatgggaacaagtgtacagaagaattttttttttaagatatgtgagaacttttcatagatgaactttttaacaaatgttttcatttacaggaaattgcaaagaaaattctcaagtgatagtctttttttttaagtgtttcgtaagacaaaaattgaataatgttttttgaagttctggcaagattgaagtctgatattgcagtaatgatatttattaaaaacccataactaccaggaataatgatacctcccaccccttgattcccataacataaaagtgctacttgagagtgggggagaatggcatggtaggctacttttcagggccttgacaagtacatcacccagtggtatcctacatacttctttcaagatcttcaaccatgaggtaaaagagccaagttcaaagaaccctagcacaaatttgctttgggattttcttttctgga

SEQ ID NO: 615 - protein, 2468 aa, Homo sapiens
MATVVVEATEPEPSGSIANPAASTSPSLSHRFLDSKFYLLVVVGEIVTEEHLRRAIGNIELGIRSWDTNLIECNLDQELKLFVSRHSARFSPEVPGQKILHHRSDVLETVVLINPSDEAVSTEVRLMITDAARHKLLVLTGQCFENTGELILQSGSFSFQNFIEIFTDQEIGELLSTTHPANKASLTLFCPEEGDWKNSNLDRHNLQDFINIKLNSASILPEMEGLSEFTEYLSESVEVPSPFDILEPPTSGGFLKLSKPCCYIFPGGRGDSALFAVNGFNMLINGGSERKSCFWKLIRHLDRVDSILLTHIGDDNLPGINSMLQRKIAELEEEQSQGSTTNSDWMKNLISPDLGVVFLNVPENLKNPEPNIKMKRSIEEACFTLQYLNKLSMKPEPLFRSVGNTIDPVILFQKMGVGKLEMYVLNPVKSSKEMQYFMQQWTGTNKDKAEFILPNGQEVDLPISYLTSVSSLIVWHPANPAEKIIRVLFPGNSTQYNILEGLEKLKHLDFLKQPLATQKDLTGQVPTPVVKQTKLKQRADSRESLKPAAKPLPSKSVRKESKEETPEVTKVNHVEKPPKVESKEKVMVKKDKPVKTETKPSVTEKEVPSKEEPSPVKAEVAEKQATDVKPKAAKEKTVKKETKVKPEDKKEEKEKPKKEVAKKEDKTPIKKEEKPKKEEVKKEVKKEIKKEEKKEPKKEVKKETPPKEVKKEVKKEEKKEVKKEEKEPKKEIKKLPKDAKKSSTPLSEAKKPAALKPKVPKKEESVKKDSVAAGKPKEKGKIKVIKKEGKAAEAVAAAVGTGATTAAVMAAAGIAAIGPAKELEAERSLMSSPEDLTKDFEELKAEEVDVTKDIKPQLELIEDEEKLKETEPVEAYVIQKEREVTKGPAESPDEGITTTEGEGECEQTPEELEPVEKQGVDDIEKFEDEGAGFEESSETGDYEEKAETEEAEEPEEDGEEHVCVSASKHSPTEDEESAKAEADAYIREKRESVASGDDRAEEDMDEAIEKGEAEQSEEEADEEDKAEDAREEEYEPEKMEAEDYVMAVVDKAAEAGGAEEQYGFLTTPTKQLGAQSPGREPASSIHDETLPGGSESEATASDEENREDQPEEFTATSGYTQSTIEISSEPTPMDEMSTPRDVMSDETNNEETESPSQEFVNITKYESSLYSQEYSKPADVTPLNGFSEGSKTDATDGKDYNASASTISPPSSMEEDKFSRSALRDAYCSEVKASTTLDIKDSISAVSSEKVSPSKSPSLSPSPPSPLEKTPLGERSVNFSLTPNEIKVSAEAEVAPVSPEVTQEVVEEHCASPEDKTLEVVSPSQSVTGSAGHTPYYQSPTDEKSSHLPTEVIEKPPAVPVSFEFSDAKDENERASVSPMDEPVPDSESPIEKVLSPLRSPPLIGSESAYESFLSADDKASGRGAESPFEEKSGKQGSPDQVSPVSEMTSTSLYQDKQEGKSTDFAPIKEDFGQEKKTDDVEAMSSQPALALDERKLGDVSPTQIDVSQFGSFKEDTKMSISEGTVSDKSATPVDEGVAEDTYSHMEGVASVSTASVATSSFPEPTTDDVSPSLHAEVGSPHSTEVDDSLSVSVVQTPTTFQETEMSPSKEECPRPMSISPPDFSPKTAKSRTPVQDHRSEQSSMSIEFGQESPEQSLAMDFSRQSPDHPTVGAGVLHITENGPTEVDYSPSDMQDSSLSHKIPPMEEPSYTQDNDLSELISVSQVEASPSTSSAHTPSQIASPLQEDTLSDVAPPRDMSLYASLTSEKVQSLEGEKLSPKSDISPLTPRESSPLYSPTFSDSTSAVKEKTATCHSSSSPPIDAASAEPYGFRASVLFDTMQHHLALNRDLSTPGLEKDSGGKTPGDFSYAYQKPEETTRSPDEEDYDYESYEKTTRTSDVGGYYYEKIERTTKSPSDSGYSYETIGKTTKTPEDGDYSYEIIEKTTRTPEEGGYSYDISEKTTSPPEVSGYSYEKTERSRRLLDDISNGYDDSEDGGHTLGDPSYSYETTEKITSFPESEGYSYETSTKTTRTPDTSTYCYETAEKITRTPQASTYSYETSDLCYTAEKKSPSEARQDVDLCLVSSCEYKHPKTELSPSFINPNPLEWFASEEPTEESEKPLTQSGGAPPPPGGKQQGRQCDETPPTSVSESAPSQTDSDVPPETEECPSITADANIDSEDESETIPTDKTVTYKHMDPPPAPVQDRSPSPRHPDVSMVDPEALAIEQNLGKALKKDLKEKTKTKKPGTKTKSSSPVKKSDGKSKPLAASPKPAGLKESSDKVSRVASPKKKESVEKAAKPTTTPEVKAARGEEKDKETKNAANASASKSAKTATAGPGTTKTTKSSAVPPGLPVYLDLCYIPNHSNSKNVDVEFFKRVRSSYYVVSGNDPAAEEPSRAVLDALLEGKAQWGSNMQVTLIPTHDSEVMREWYQETHEKQQDLNIMVLASSSTVVMQDESFPACKIEL

SEQ ID NO: 616 - DNA, 1680 bp, Homo sapiens
gcccgctgttgcgtgctgccagcgggaactgtgtaggggtagattttcgctgcagtgttccccgagcctgttagacgcagcgcgccgggagactgagagaggaaaggatagaggaagtgctgccctaggctgcatgagtcgaagcaagcgtgtttccttcccgccaggcaagtgcccttagaaaccgggccccgcccccttcctggcctgcattcccatcccctctcccggggcggaggtgaggacctctttggttcctttggttctgtcagtgagccccttccttggccatgaagctcgtgaggaagaacatcgagaaggacaatgcgggccaggtgaccctggtccccgaggagcctgaggacatgtggcacacttacaacctcgtgcaggtgggcgacagcctgcgcgcctccaccatccgcaaggtacagacagagtcctccacgggcagcgtgggcagcaaccgggtccgcactaccctcactctctgcgtggaggccatcgacttcgactctcaagcctgccagctgcgggttaaggggaccaacatccaagagaatgagtatgtcaagatgggggcttaccacaccatcgagctggagcccaaccgccagttcaccctggccaagaagcagtgggatagtgtggtactggagcgcatcgagcaggcctgtgacccagcctggagcgctgatgtggcggctgtggtcatgcaggaaggcctcgcccatatctgcttagtcactcccagcatgaccctcactcgggccaaggtggaggtgaacatccctaggaaaaggaaaggcaattgctctcagcatgaccgggccttggagcggttctatgaacaggtggtccaggctatccagcgccacatacactttgatgttgtaaagtgcatcctggtggccagcccaggatttgtgagggagcagttctgcgactacatgtttcaacaagcagtgaagaccgacaacaaactgctcctggaaaaccggtccaaatttcttcaggtacatgcctcctccggacacaagtactccctgaaagaggccctttgtgaccctactgtggctagccgcctttcagacactaaagctgctggggaagtcaaagccttggatgacttctataaaatgttacagcatgaaccggatcgagctttctatggactcaagcaggtggagaaggccaatgaagccatggcaattgacacattgctcatcagcgatgagctcttcaggcatcaggatgtagccacacggagccggtatgtgaggctggtggacagtgtgaaagagaatgcaggcaccgttaggatattctctagtcttcacgtttctggggaacagctcagccagttgactggggtagctgccattctccgcttccctgttcccgaactttctgaccaagagggtgattccagttctgaagaggattaatgattgaaacttaaaattgagacaatcttgtgtttcctaaactgttacagtacatttctcagcatccttgtgacagaaagctgcaagaagggcactttttgattcatacagggatttcttatgtctttggctacactagatattttgtgattggcaagacatgtatttaaacataaactaaaaggaaataaaaaaaaaaaaaaaaaaaaaaaaaaaaaaaaaaaaaaaaaaa

SEQ ID NO: 617 - protein, 385 aa, Homo sapiens
MKLVRKNIEKDNAGQVTLVPEEPEDMWHTYNLVQVGDSLRASTIRKVQTESSTGSVGSNRVRTTLTLCVEAIDFDSQACQLRVKGTNIQENEYVKMGAYHTIELEPNRQFTLAKKQWDSVVLERIEQACDPAWSADVAAVVMQEGLAHICLVTPSMTLTRAKVEVNIPRKRKGNCSQHDRALERFYEQVVQAIQRHIHFDVVKCILVASPGFVREQFCDYMFQQAVKTDNKLLLENRSKFLQVHASSGHKYSLKEALCDPTVASRLSDTKAAGEVKALDDFYKMLQHEPDRAFYGLKQVEKANEAMAIDTLLISDELFRHQDVATRSRYVRLVDSVKENAGTVRIFSSLHVSGEQLSQLTGVAAILRFPVPELSDQEGDSSSEED

SEQ ID NO: 618 - DNA, 2366 bp, Homo sapiens
gaccacgcgtatcgatgtcgacccacaggattgtcacagagggcagggtggtgactgaggaccagctcctcatgcttgaggctgtggtgatgcacctcgggatccgctctgcccgctgtgtcctgggcatggagggtcagcaggtcatcctgcacctgcccctatcccagaaggggcccttctggacatgggagcctagtgcccctcgaactctgctccaggtcctacaggatccagccctgaaagacctcgtcctcacctgccccaccctgccctggcattccctgatcctgcggccccagtatgagatccaagccatcatgcacatgcgcaggaccattgtcaagatcccttctaccctggaggtcgacgtggaggacgtcaccgcctcctcccggcacgtccactttatcaaaccgctgctgctgagcgaggtcctggcctgggaaggccctttccccctgtccatggagatcctggaggttcctgagggccgccccatcttcctcagcccgtgggtgggctccttgcaaaaaggccagaggctttgcgtctatggcctagcctcaccaccctggcgggtcctggcctcaagcaagggccgcaaggtgcccaggcacttcctggtgtcagggggctaccaaggcaagctgcggcggcggccaagggagttccccacggcctatgacctcctaggtgctttccagccaggccggccactccgggtggtggccacaaaggactgtgagggcgagagggaggagaatcccgagttcacgtccctggctgtgggtgaccggctggaggtgctggggcctggccaggcccatggggcccagggcagtgacgtggatgtcttggtttgtcagcggctgagtgaccaggctggggaagatgaggaggaagagtgcaaagaggaggcagagacccagagcgggtcctgctgcccttccacttccctggcagtttcgtggaggagatgagtgacagccggcgctacagcctggcagatctgactgcccagttttcaatgccttgtgaggtcaaggtggtggccaaggacaccagccaccccaatgaccctcagaacctccttcctgggcctgcggctggaggagaagatcacagagccattcttggtggtgagcctggactctgagctgggatgtgctttgagatccctccccggaggctggacctgactgtcgtggaggccaaggggcagccagacttgccagaggggtctctccccatagccacagtggaggaagctggaacagacaccttttattattgtcttcggaagttaccagcctgtgagatccaagcccccccacccaggccccctaaaaatcagggcctcagcaagcagaggagacacagcagtgagggaggcgtcaagtcttctcaagtcttaggattgcagcaacacgttcggctgcccaaacccaaggcgaagaccttgccagagttcatcaaggatggctccagtacgtacagcaagattcctgcccacaggaagggccacaggcccgctaagccccaaaggcaggatctagatgatgatgaacatgattatgaagaaatacttgagcaatttcagaaaaccatctaagtgctggaggaaccacgcttcctaactgctgcttctcagggaatccgacaccagccaaccattttaagcctctaaaagacctcgggcaagtctcacagaaactgagctgcagacggggagtagctttgtggaaactgatttgatggacactgcaccagcttccttcaggttctagattcttgctacttagggcgggctggtttggacctaacatctcgcacgtgactccctcagcctcagagccttgggatgcagagcagctggcagggttcctctcaatcctgcaaccccagctgtcccaccggtggatgcagaggggaatccgaggccatcaaccttggtgacagcagcgcagtgccaatgctgatcacactgcatgggagattttgttaacgtctgccacccccactctcacccccaagctctaagcccccgggaggcctggactgtcttcctcatctctgtagcaccaagcctgatagatctgtatatggtaaacaggggtttaaccacatgtggttaacatggattaatgtgggaatttggcttcaagaacacaaccttaggaccttgggccccaaaagctggtggtgaaatgagaggagccaatttaagaagacccttatggagacctgaggctgcagaaactggtaggtttcatcaggtggttaaagtcgtcaaagttgtaagtgactaaccaagattatttcattttaaaaccacagaataaaaatgacacctgagcttctcc

SEQ ID NO: 619 - protein, 284 aa, Homo sapiens
MEGQQVILHLPLSQKGPFWTWEPSAPRTLLQVLQDPALKDLVLTCPTLPWHSLILRPQYEIQAIMHMRRTIVKIPSTLEVDVEDVTASSRHVHFIKPLLLSEVLAWEGPFPLSMEILEVPEGRPIFLSPWVGSLQKGQRLCVYGLASPPWRVLASSKGRKVPRHFLVSGGYQGKLRRRPREFPTAYDLLGAFQPGRPLRVVATKDCEGEREENPEFTSLAVGDRLEVLGPGQAHGAQGSDVDVLVCQRLSDQAGEDEEEECKEEAETQSGSCCPSTSLAVSWRR

SEQ ID NO: 620 - DNA, 2147 bp, Homo sapiens
ctgggggtgcctcttcctgggcgcccgccgcctgcatcctgctcgccctgtctgggaatggggccgcccccgggcttgggccggcccggctggggcccccgaggcgcttccgccccgtagtgaccgcctggtgccgccccccccccaggatgaagggcggcgagggggacgcgggcgagcaggccccgctgaaccctgagggcgagagccctgcaggctcggccacgtaccgggagttcgtgcaccgcggctacctggacctcatgggggccagtcagcactcgctgcgggcgctcagctggcgccgcctctacctcagccgggccaagctcaaagcttccagccgcacgtctgccttgctctcgggcttcgccatggtggccatggtggaggtgcagctggagagtgaccacgagtacccaccaggcctgctggtggccttcagtgcctgcaccaccgtgctggtggctgtgcacctctttgcactcatggtctccacgtgtctgctgccccacattgaagctgtgagcaacatccacaacctcaactctgtccaccagtcgccacaccagagactgcaccgctacgtggagctggcctggggcttctccactgccctgggcacctttctcttccttgctgaagttgtcctggttggttgggtcaagtttgtgcccattggggctcccttggacacaccgacccccatggtgcccacatcccgggtgcccgggactctggcaccagtggctacctcccttagtccagcttccaatctcccacggtcctctgcgtctgcagcaccgtcccaggctgagccagcctgcccaccccggcaagcctgtggtggtggtggggcccatgggccaggctggcaagcagccatggcctccacagccatcatggtacccgtggggctcgtgtttgtggcctttgccctgcatttctaccgctccttggtggcacacaagacagaccgctacaagcaggaactagaggaactgaatcgcctgcagggggagctgcaggctgtgtgagactggtgttagccaccgctcactgcaagcactgcctccctccggggtctgtaagaggccgcaggggcctacagacctcatccccccatcccctggctggagccacttccagtggccactctcaggcagagttcagattcctgcccgcagggtcctctgggctgggccttggggcagctcccacattcccagggattttccccatcagtctgtcccttgggttttgcaagctactctgcacctgggctggcctcagttgaaggatcatgcagtagatagaggggaggcagggagagcttgtgggaccttcagtgctgactttagccaccatttccattcctatacaggatgtgaaggtcagaaggcagccaattgttggtttaattttttttttttttgagacagtctgtttcccaggctggagtgtagtgatacagtcacagctcactgtagcctcgaccttccaggctcaaaagatgctcccaccacagcctcccaggtagtgagtagctggtactacaggtgtgtgctgccacacccgactaatttttttgtagagacggggtttcgctgttcccaggctggtctcaaactcctgggctcaagtgaacctcccgcctcggcctcccaaagtgctgggattcctttctttatttctgtagaatctattttatggttggcattttgggggaagatttcgatgggttccacattcttgctttagttgttgtagagggatttgggtgtttctacccaaggcattggtctagcttttcctacaatgaacctatctttggaggttcaagctccccaccttcccccactgtggtgacctgtggccacttgcagaagggatggtgcctgacccactgccctagccccacgctatgcaccaaacttgttctccccgtcctggtccagggctggggtctttagagactgacagcctctgccccaggcctgagtccttagcaagggttgggtaaggaggttttaagggagaaggtccagtccttagcccttgaaatacaaagctcttctgacactgaatttggatgcaccttgttttatataataaatcgtgtttcacagaaaaaaaaaaaaaaaaaa

SEQ ID NO: 621 - protein, 295 aa, Homo sapiens [sequence omitted]

SEQ ID NO: 622 - DNA, 4599 bp, Homo sapiens
ggcacgaggaggaccactgtcagtggaaaccgcaggagaggtctgtggtgggcctctggcccttggcggattcgatccgttcccccagggaccatccacggatggcttcttccttcatgtaggcagggccgatgaagacaccgagggaaggttatatgttagttgttcaaaaagccccaactcccacgattcagagccgtggactctcctcaggcaggattctgactcggatgtggtggacatagaggaagccgagcacgatttcatgggtgaggcccatcctgtggttttcagcagatacattggggaggaagagtcggccaaactgcaggaggacatgaaggtgaaggaacatgaagacaaagatgacgccagcggccgctcgagcccctgcctgagcacagcctctcagatgagcagtgtctccatggcgagtgggagcgtgaagatgaccagctttgcggagaggaagctccacagactcaacagctgtgagaccaagtccagcaccagcagctcccagaagaccacgccagatgcgtctgagagctgcccagcccctctgacgacgtggaggcagaagagggagcagagtccgagccagcatggcaaggatcccgccagcctcctggcatctgagctggtacagctgcacatgcagctggaggagaagcgcagggccatcgaggcccagaagaagaagatggaggcgctgtcggcaaggcagcgcctgaagctcggcaaggctgcattcctgcatgtggtgaagaagggcaaggccgaggctgccccacccctcaggccggagcactttgcaaaggagtactctcagcacaacggggaggactgtggggacgctgtttccaaaaccgaagactttctcgtgaaggaggagcagagagaggagctccttcacgagccacaggatgtggacaaagagagcctggcctttgctcagcaacataaagcaaaagaccctgtggctctgcacgagctggagagaaataaggtgatctccgctgccctcctggaggacactgttggggaggttgtcgacgtgaatgaatgtgacctttccatcgagaagcttaacgaaaccatcagtacgctgcagcaggccatcctgaaaatctctcagcagcaagagcagcttctgatgaagtcccccacagtcccagtgccaggctctaagaataactcgcaggaccacaaagtgaaggcaccagtccacttcgtggagccactctctcccacgggcgtggctggccaccgcaaagccccccggctgggtcaaggccggaattcccgttccggaaggccggcggagctgaaggtcccaaaagacaggccacagggctcctcccgaagtaaaaccccaacgcccagtgtagagacgctcccgcacttgagacccttccctgccagcagccaccctcggacgcccacggaccctggcctggacagtgccctggagcccagtggtgacccacatgggaagtgtctcttcgacagttacaggctccatgatgaaagcaatcagcggacacttactctgtcctcttccaaagatgccaacattctttcggagcagatgagcctcaaagaagttctggatgcgagtgtgaaggaggtggggtccagctcctcagatgtctcgggaaaagagagcgtccccgtggaggagcctctgaggagcagggccagcctcattgaagtggacctctccgacctgaaggcccccgacgaggatggggagctggtaagcctcgatggctcggcggaccttgtcagcgaaggcgaccagaagccgggggtcggcttcttcttcaaggatgaacagaaagcggaagatgagctcgccaagaagcgggcggccttcctcctgaagcagcagcgcaaggccgaggaggcccgcgtgcgcaagcagcagctggaagcggaggtggagctcaagcgtgacgaagcccggcgcaaagctgaggaagaccgggtgcggaaggaggaggagaaggcgcggcgcgagctcatcaagcaggagtacctgcggaggaagcagcagcagatcctagaggagcaggggctcggcaagcccaagtcaaagccgaagaagccgcggccgaagtcggtgcaccgggaagagtcgtgcagcgactccggcaccaagtgctcctccacccctgataacttgagccggactcagtcaggctccagcctgtccttggcctctgcggcgacgacagaacccgagagcgttcattccgggggcacaccctctcagcgagtggaatcgatggaagccctgcccatactgagccgtaacccaagcaggagcacagaccgagactgggagaccgcgtcggcggcatcttccctggcctcagtggccgagtacacaggtcccaagctctttaaggagcccagtagtaaatcaaacaagccgattattcacaatgccatatcccattgctgcctggctggaaaagtgaacgaaccccacaagaattccatattggaggagctggagaagtgtgatgccaatcactacatcatactgtttcgtgatgctggctgccagttcagggcgctttactgctactatcctgatactgaggaaatctacaaactcactggcacggggccaaagaacatcaccaagaaaatgatcgacaaactgtataaatacagctcagaccgaaaacagtttaacttgatcccagccaaaaccatgtctgtcagtgtggacgcactcacaatccacaaccacctgtggcagcccaagcggcctgcagtgccaaagaaggcccagactcgtaaatgaccccggtgcagctggcgtccaaagggtgacccagactcgtaaatgatgcccttgtggctggcatccagagggtgccacggggtccttatttattgttttcatctatttgggtacgaagtgtgcaaagtcacagaccttttgcaaagaggtttctagacagcagaagaaaacccctctctcagcgctcatctcacgcagaggatgccaggcagggtgaggatgggggagtagatgccgcttttgcagtggctcgcactgctgtggccactgctgaccactgaggctcccagcggagggtgttcacagccaggtcccgggccacggagctcccttacttgaagttctccttcagcatagattagacgtgatccactttgctttcttgcttctcacctcgcccccttgcacattgcctgacaccctcatattggccagctgtaatctcgtgactatgggactgaggctcaatcttggcttggggtgtttgaatgtctatagcaaaggaattcataatgggaaatctttttcatttgagaaattgtatgatatttattggttgtgtctactgccaacatttatatccaattctaagatttctgaaaaaaaattcttatcccttgctgctcagaaaaagtttacggaaaacaccagttcactaaaagcaccgaaatctgcaaagcctgtcttccgctagaacaacgtctacaaatgtgaagatgatgacttctggcacgcggtcatgagggtggggaatggcactaggagctgatgtttgcctcatttaaagtaggcaagccgagccaactgcagccatcattcattaagttttgggtagtgctctaatggtttgttcactttaataaagacagattttggtaaagtagaatatttttcattctgagcatgtttgtcccaaaaggtgatgcacttaagctgacagtcccttcagtggttttgttaggtcacggcttgtcctgtctggattctgcatctggaagcgctgcatgctctcagaggagcgtgccgtttcccctgtagatggatacttttgttttgttgcctatttaaaaacaattaagtggttatttgcagttatttcagaactccaagtaagtggatggctttgggttctttctgccttggtcccaatggtgttgatgcttctgtggagcgcggacattcccaggagcaggtgcgtgccagccatggctgccagacactgctgcaactgaccagctgccggaagattctggagccactaacattagttttgcacatattttcttgggagtgttacttgaatctatctcaaactgcagaaaaaatcaaaagatcaataattgggagaaaaagagacaaatttaactgttacataattttagatagacaaaaaacatgagtgagtcgtgtacataaggagggaacatggtacagaaggctagaaggaattataggtcttattcccctttcctcagtcctttgaagagaagtacagtctcttgcgattttgtatatatcgtgttcgacacagccgctctctgtcctgtaaatagggaactaaaggctgtatgatttctcaagtgctgagttacacagtcctgagtgagctttctgttaccatactttcacacgtgggctttatttctcactgtatgtttgatatgatattactgtatttattttaagaaagcactaagatgtaataaagtgatgaactaatttgctttaaaaaaaaaaaaaaaaaaaaaaaaaaaaaaaaaaaaaaaaaaaaaaaaaaaaaa

SEQ ID NO: 623 - protein, 938 aa, Homo sapiens
ARGGPLSVETAGEVCGGPLALGGFDPFPQGPSTDGFFLHVGRADEDTEGRLYVSCSKSPNSHDSEPWTLLRQDSDSDVVDIEEAEHDFMGEAHPVVFSRYIGEEESAKLQEDMKVKEHEDKDDASGRSSPCLSTASQMSSVSMASGSVKMTSFAERKLHRLNSCETKSSTSSSQKTTPDASESCPAPLTTWRQKREQSPSQHGKDPASLLASELVQLHMQLEEKRRAIEAQKKKMEALSARQRLKLGKAAFLHVVKKGKAEAAPPLRPEHFAKEYSQHNGEDCGDAVSKTEDFLVKEEQREELLHEPQDVDKESLAFAQQHKAKDPVALHELERNKVISAALLEDTVGEVVDVNECDLSIEKLNETISTLQQAILKISQQQEQLLMKSPTVPVPGSKNNSQDHKVKAPVHFVEPLSPTGVAGHRKAPRLGQGRNSRSGRPAELKVPKDRPQGSSRSKTPTPSVETLPHLRPFPASSHPRTPTDPGLDSALEPSGDPHGKCLFDSYRLHDESNQRTLTLSSSKDANILSEQMSLKEVLDASVKEVGSSSSDVSGKESVPVEEPLRSRASLIEVDLSDLKAPDEDGELVSLDGSADLVSEGDQKPGVGFFFKDEQKAEDELAKKRAAFLLKQQRKAEEARVRKQQLEAEVELKRDEARRKAEEDRVRKEEEKARRELIKQEYLRRKQQQILEEQGLGKPKSKPKKPRPKSVHREESCSDSGTKCSSTPDNLSRTQSGSSLSLASAATTEPESVHSGGTPSQRVESMEALPILSRNPSRSTDRDWETASAASSLASVAEYTGPKLFKEPSSKSNKPIIHNAISHCCLAGKVNEPHKNSILEELEKCDANHYIILFRDAGCQFRALYCYYPDTEEIYKLTGTGPKNITKKMIDKLYKYSSDRKQFNLIPAKTMSVSVDALTIHNHLWQPKRPAVPKKAQTRK

SEQ ID NO: 624 - DNA, 4413 bp, Homo sapiens
gagcagcgcctgctgcctgctgtgacctttgatggcaaggttatcctggagcggaaagacaaagttgccatggccccagacggcaacgggggcctctactgcgcgctggaggaccacaagatcctggaggacatggagcgccggggagtggagtttgtgcacgtgtactgtgtggacaacatcctggtgcggctggcggaccctgtcttcatcggcttctgtgtgttgcagggcgcagactgtggcgccaaggtggtggaaaaggcataccccgaggagcccgtgggcgtggtgtgccaggtggacggtgtcccccaggtggtggagtacagcgagatcagtcctgagaccgcacagctacgtgcctccgacgggagcctgctgtacaatgcaggcaacatctgcaaccacttcttcacccgaggcttccttaaggcggtcaccaggtgtgcggcagcaggtggctgcggattgccggccagagccgcctgcgttgaccagggacccgcggggtcccagtgagctgagtgccctgggccacagcggctgtggtcaggagtggctgtggtcaggcacggctgatgggtcggggtggagaatggatcctgagcttgcaaaggcagaggtgctggagatcaggcacaagccgtgctcagcaggcagctgctgtaaggctctgtgatcaagtctgccatctcctccttctggggacctgccctggtgcccagggtgctacctctgctctggggcttgccagtttgtttgcctgggcagggatgtggctgatggtgcctggcacttggcacagggatgcagggaggaggcctgtgcctgcttctccctggagatctggccctactctgccgcttctgtgccctgtagtgtccttctgccatcctgtcccacccagctgggtgtgctcagaagtggggacagagcccccagcggtgccatatctgatctgtttctttcctcccctctgctctcccgtgccccagggagtttgagcctttgctgaagccacacgtggctgtgaagaaggtcccgtatgtggatgaggaggggaatctggtaaagccgctaaaaccgaacgggataaagatggagaagtttgtgtttgatgtgttccggtttgctaagttagtagtagaactcatttattttccccttcttccttctctcagttttggtggtgggaactgaggcgcagctggtagggaagtagaggcttgagggagccaagggccccgcgggcaagtctcagggagaagaccagagggtgctcttggccctgagggtaagcagcccctgaggtgggggcatagggagtccttggggctgtggacttgggaggacagtagtgccacctcccggaccttccactgcccccacccatggttaggagaggtctcctggccaggttgccagggcggctcgcagggcctttggccctcactgcaggggtcccagggttgggccttcggctgctggaaatggctgctgggattgggccatccctggcgtctcaggagcaaaaacactcagtacctgcgggggctcctccctagacttgctgcccatgggaccagaccttcactctgtcactggaaacctggcccagctctcacctgcccggatcagggcctctgtgccgggacgtgggtgactagccctttccccaccaggaactttgctgccttggaagtgctgcgggaggaggaattttccccactgaagaacgcagagccagccgacagggacagtccccgcaccgctcgccaggccctgctcacccagcactaccggtgggctctgcgggccggggcccgcttcctggatgcccatggggcctggctcccagagctgcccagcttgcccccaaatggagaccctccggccatctgtgagatatcgcccttggtgtcttactctggagaggtgagagctgcccatccctatctggggcttttctggtgtcaggtttggaataccatctggggagaggtggctgctcgggtggagacggcacagctctacctcggttaaccaatggggtcggtggtttaaatttgcagaagactttccaagatatgggttggggtggggtgaggcatccagaggcctttgcaggtcctgggagggcatggggatgagacagcccaggtctgagcccagtgtggggccagtcaggccttggtgggggccttgcggagggaggacaccggcctctgctacctccctgacctcggctgcccttgcccctttctctggtcaggtcagacctgtgcgtgacaggagggtcccctgctggcctagggtcttgagtgtggtcttgggtggccttgcagtgtgtgtctgctcctggccctggaagcctttctgtccccacccctccctgactccaggcagacctgggatcgcacctggggactgtggctcttggtgtgggccagaggggctgtgacccgccaaaaggtgggtacttggccattgtcccctgctcgtctccagggtttagaagtgtacctgcaaggccgggagttccagtccccgctcatcctggatgaagaccaggccagggagccgcagctggaggagtcctgacccgcccagactgcccccagactcccccgagacctgccagccccggcatcctggaagtcccgactccccccagacctgccagccccggcgtcctggagctgggggctacagcccagcctgagctctgggtgggaaagcagcctgccccatgcttccagcctgcagaacacagaatgaaacatgctggtagactccacgagggcagggcctctcctgtcgcctctggacacaagtggcgacagcctgctgggggctctgtggctccattcctggctgtggggtctagtcaagaggcagagggacttgggacctgggagaatggggctgagaggaggcttcgggttggggcccaagggaggtgtggtgtcatctggggagaacaggagggcatgtccctttgggagcccgccttgtggatccaccacaccccaccgagcactaaaagctgcataagctacacaggatgtgcttctgcagcctacagatgcagaaccagaatgagggggacaattccacccactcgagggctgccccctcttccttagcagacgaaccagtaatgggggcaagggtggggcatcccagcccacacaccctggatgcccagcaaggccacagaaagagcctgatgtccatgatccaggtggctctgagaagcttggcctggacacctgagcctgcggccggtactcctgccttctccccatctatccccaaggcctctgcctctcagcctcttccatggtcggtttaggctgctgagttttctgtgcttccccaagaaccagtgggatcaatgccggcggcctctgtgatggttgctgactaatccgggatttcatgagtcagaggcaccacccctcaccccagctgcctgctgcttctgacggatcttggtgctcaggctgcctggctctccgagtgaggacgcagcctccatatttggtgcactcaggcatggctgggacaagccagctgccccagggttcttcccctggtgattctcgcctgctttctcatctcaggggaggcagtggcacctccctctccctgctgacatgaagagagctatgatatgccactgctgccaactcatcctctgcccccacctcgaaacccacagtccccagtggagggccactactcatccccattggtttcccaggggaggggtgttgtctggaagggcaggttcagatgcagccttccagatttagaggcactgggaggacagtggctgagtggaggcgcccagacctgggcaggcagcaggctcaggcccacaccttgtgatttttgaaaccaaagcccagaagatgatgtttacttctctctccctggctctgcccttcttactgcaaaccatgctgtgccttagggcccttctcatagctgttcctcatggccatgactggaacagggatgcaacctctttctacacaagcacagttagttgggtgaagtcttttttttttgtttgttttagacggagtttcactcttgttgcccaggctggagtgaagtggcgtgaccttggctcactgcaacctccaggccagcctcagcctccctagtagctgggactacaggcacccactaccacgcctggctaattctttgtatttttagtagagatggggtttgaccgtgttagccaggatggtctcgatctcctgacctcgtgatccacccacctcggcctcccaaagtgctgggattataggtgtgagccaccgcgccgggccggttgctggcatcttaattttctttaggtggaatatttccaataaacacaaggtgccgtaattg

SEQ ID NO: 625 - protein, 270 aa, Homo sapiens
GSQGPRGQVSGRRPEGALGPEGKQPLRWGHRESLGLWTWEDSSATSRTFHCPHPWLGEVSWPGCQGGSQGLWPSLQGSQGWAFGCWKWLLGLGHPWRLRSKNTQYLRGLLPRLAAHGTRPSLCHWKPGPALTCPDQGLCAGTWVTSPFPTRNFAALEVLREEEFSPLKNAEPADRDSPRTARQALLTQHYRWALRAGARFLDAHGAWLPELPSLPPNGDPPAICEISPLVSYSGEVRAAHPYLGLFWCQVWNTIWGEVAARVETAQLYLG

SEQ ID NO: 626 - DNA, 5544 bp, Homo sapiens
ctcctgcacggcgagtgctggagcacgagctaccgctcgctcggtcagggcgccccctccgcccgcctcctgcttcctcctccgctgcctgccgccgccgcctccaccattgtataatgctcggggcgcgcaggcagagaacggcggagtcttagcttcagcctcgcctgctgcccgctccccggcgccaccctcgggcccctggagcggggcactccgcatggagcgggagtagctgaggagtgggcggaaacccctcctgatgcgttagttcccaggtggagctgcatgtgatatatgttgggtaaaggaggaaaacggaagtttgatgagcatgaagatgggctggaaggcaaaatcgtgtctccctgtgacggtccatccaaggtgtcttacaccttacagcgccagactatcttcaacatttcccttatgaaactctataaccacaggcccctgacagagcccagcttgcaaaagaccgttttaattaacaacatgttgaggcggatccaggaggaactcaaacaggaaggcagcctgaggcccatgttcaccccctcctcccagcccaccaccgagcccagcgacagctaccgagaggccccgccggccttcagccacctggcgtccccgtcctcccacccctgcgacctcggaagcactacgcccctggaggcctgcctcaccccggcctcactgctcgaggacgacgatgacacgttttgcacctcccaggccatgcagcccacggctcccaccaaactgtcacctccagccctcttgccagaaaaggacagtttctcctctgccttggacgagatcgaggagctctgtcccacatctacctccacagaggcggccacggctgcgactgacagtgtgaaagggacctccagcgaggctggcacccagaaactcgacggtcctcaagagagccgcgcagatgactcaaaactgatggactctctgcctgggaattttgaaataacgacgtccacgggtttcctgacagacttgaccctggatgacatcctgtttgctgacattgatacgtccatgtatgattttgacccctgcacttcctcatcagggacagcctcaaaaatggcccctgtgtctgccgacgacctcctcaaaactctggctccttacagcagtcagcctgtcaccccaagtcagcctttcaaaatggacctcacagagctggaccacatcatggaggtgcttgttgggtcctaagacccagggacccagcgactatgcccacccagaccccagagcgttcccataaccctgacagttctccacactgtgcatgcacccttgcttgcctttttcagagaaaaagaaaattttacaacaggatcacactagtttttgctttgagcagagttggagtgccttcatccaagtatgaccacttttaatacacttttttgagtggttcctcagagacctactaccctggtataggaaagaatccatttgaagacaatgttgcaatgttgaatgacaaaaataaacagttcaagtgaagcacaaggattaagttggaaaagctgtaaattgcatgtgcatatttgtctattttttctataagttttattgcaagaggtaaagaagaaaactatatatatatatcttatttagataatctcagtaccttttctggcatttttgccctgtataggttgacttggcaattcggcctttttagaggcattaactactcctcgtaagtgttgcatttacatggctgtttagaaaactgctgcccaaatttattttatatttttgtacagattctgcagtttatgatattgtttttctaaaaacaaatgctgtttatacatatgagatagctattttgataggatttgctcacatagttcctgcaaacttcagatgtacaagttgcacttgtacttttatagagttgtaatgttttatatgtgtatggtgcaagagaaaattggatcaaatcaatctgcagttgatgtccccaaatgcaaacacaggcacacacatgcacacacccataaacacacacacagtgctttaagaaagggccaggtgatatcacacccaaatttcacaagcactgaccccctggcaccaacacccgccagtactgtgacttccaaagccagagccacatgtgctcatcaaacttgcattaagcagttggcgggagatggctgtggagctgggggtttaagtgatggttctcttttgctccctcttttgagggtaaagctactgtctttcttaagagtgtatttatgccaagtttgcgcttttaattgtttttattttgttttttaatgaaaacccagatctttcctttttggcataatttttatgatgacctgaaattttacatccgaacaaaattttacatccgaaaagcaaccaacttcttcatggaactcagccctgttgcaatgcttagggcccttaaagaagaaaatctccccagaaggcatccatcatgttgcttaattgtcttctgcagcttcctttccctagagctttccctgtgttgctaagagctgaaaatggcatcttcgtgatcaccacagtgagcttggctcgcctcggccggcccgggatgcactcttacaacatgtgtgactcttgaacctggagttcatcacattacgtcacagcttcccatctggttgctttcctgagtcagctacttcacacttgtcaaggctgttttaccccaaaactcagacaggactttctatgcatgttttccctcctccccccaattccccccccatcaccttatctcccaggacacacttgagaagtagctttttattcctagtggtgtacatttaattttaaaaaggttgcaatgtatcatgcttgttgccgaaactgtttatggccttcttgtttcagttttttcttttcttccaatggtactttagctgttgagtgcaggttacaacctatattgttatgcagatggcttctttaggaataacttttatatttatttaaaaatttttaaattatgggatgttttgttgttgttgttgtctttgttgttggtcatttgtcaatattcagtcaccaattctgctcacttcttgccatggataaaattgggtctttctggctaattaaaaaagacaactttataaaatggcactttaagcaagccatagttagttttatttttgtaatgcacatggcaaagcaaagacgtttgtgatgaaggaactgctcatctaagcaaaagatttgagtatgatatgataaaggctttctacattctaatttactttttccccccacttgaatgtgttttaaaggctaattatcagctcagtagagcagtgagaaactgatcaaattgcacttgttctcctacaagcaacctccacgcagacacctcgtactgctacaggtgtgtcatttcctttaataggaccagggaccatgtaactgaggtgagggttgtagtagatgcttccagtgtcagtatgcctgttaattttaagagcttccctttcttgcagagaacaagtctgcccagattccatgctttctataactggaggacctggcaaacctgccgcatgctgcacacatctacctacgtacacatatacaatagtattgatgattctgaacaataacagggtaaaacagttggtttgccattgttaaaaactgatttacagtaacttacaacaactgtacttttgttggattagcaaatcatgtgtttaaacaaatcccatatgttgggcaacagttcaaataagcacggagaagtgttgcccaaacttggttctctgactcttatgtatttgtaaggctgggcttcaaaatcaaaacaaaaaccccaaaaacagcaggcaaatgctttttaactctgacaccgttgccataaatccctgatactcaaagtctaacaagaaagacatggaaaattagcagcccattttcagaaagatcaaaatgatctagggttctaattgcttttgcatcctattcttacaaagtgatgtcccaacagggaacagtaggagctggagtgggatctccaagtcccagtttgagtgtgggatgtgcttccagcagtgccttccctttatgaaagacatcacatggcatccagggccaggcaggcagcttgaggtgcctttacgagaaaaccgagctggggctgggagaggacagttattgacactgatgtgcaatgaagtgacaagatgagagcagaatcgtaagagctttgaatttgaagtgagtttttttccccccataagttatttattccttttttctgtgtaaatatatttattttactgtggagcgctaacatctggatcgtaacatgtgcagaatgtatggtaggaatgtattctcttgtaggaatgtaaatctgtattaaaagggggtccaagccaggcccccaggtcttctcattgtatgcacagtccgcattcatttttactcttctctaatatgggtctatttgaaatatgcaaaaggtatgaggaatgttttaatacctccaaatttttaagaaaagcatcaaagggttgatattttttaaagtttttttagtagcactttctctggatgacagaaggggcaaccacatgggcacccttgttcataccaaagggtgagcagtggccagagcctcctctgcacctctcgagtgtctttaccaattgagctttttatcgccatagccccttggagtgccccagctgccctgaggtcaatcaaggaaaatttcttaatgaaataagctccaaagagccaaagtatcaacttacagatcgtttttaaagcttaaatttatgaaccacctttgtggtaaacaatgaattatgaataccgcagggcagccttcttaaatgacaaatgtaaaaaaaaaaaaaaaagactctacttcgtgcagcaattgctactctatacgaattgtcttaatttgaaaaccttgctgttacaaattggacctttatacattttctgaaaacaatgaaaagagtatatttaaccttttctggctgtaaatggttaccttcctgtaactgccccgcacctggaggcatggagttgtgtgcatcctgcttatgtacaattgttttcagtgtttctaagaatgagtctgaatggttcttgaaaattagccaggatcaaatgctattgcagacaaagccaataaaaagttggacttcttttggggataacaagttttggaagagaaatgcaggccatatgtgcgcatgaccgagattttgaaaaaagatgtacatagtgacatgtttggtgcatggtttttgaggagggcttttgtcaaaaaggaggtataacctttcccccacagacctgagagctgtgccttttctatgcaatattacagacgttacatcggaacccagatggctgtattcacatgtaggtttgggctgtaatctaaacaattggacagattaaatgtacatggaaatgagcagtcttacttttgtagttttatattatacaataaacagttaaaagatg

SEQ ID NO: 627 - protein, 314 aa, Homo sapiens
MLGKGGKRKFDEHEDGLEGKIVSPCDGPSKVSYTLQRQTIFNISLMKLYNHRPLTEPSLQKTVLINNMLRRIQEELKQEGSLRPMFTPSSQPTTEPSDSYREAPPAFSHLASPSSHPCDLGSTTPLEACLTPASLLEDDDDTFCTSQAMQPTAPTKLSPPALLPEKDSFSSALDEIEELCPTSTSTEAATAATDSVKGTSSEAGTQKLDGPQESRADDSKLMDSLPGNFEITTSTGFLTDLTLDDILFADIDTSMYDFDPCTSSSGTASKMAPVSADDLLKTLAPYSSQPVTPSQPFKMDLTELDHIMEVLVGS

SEQ ID NO: 628 - DNA, 1988 bp, Homo sapiens
acgcgcccagggcagcgcgccacgctgccacacatgggccggcggactgctctgaagaggtggccgaggtgaagccaaagccagagacagaagctaaggcagaggaagccagtggggagaaggtgtcaggctccgcggccaagcctaggccctatgcgtgtccgctatgccccaaggcctacaagacggcacccgagctgcgcagccacgggcgcagccacacgggggagaagccctttccgtgccccgagtgcggccgccgcttcatgcagcccgtgtgcctgcgcgtgcgcctggcctcgcacgctggcgaactgcccttccgctgtgcgcactgcccgaaggcctatggcgcgctctccaagctcaagatccaccagcgtggccacacaggcgagcggccttacgcctgcgccgactgcggcaagagctttgctgacccttcagtgttccgcaagcaccggcgtactcacgctggcctgcggccctacagctgtgagcgttgcggtaaagcctatgcggagctcaaggacctccgcaaccatgagcggtcccacaccggcgagcgccccttcctctgctccgagtgcgggaagagcttctcccgctcatcctcgctcacgtgccaccagcgcatccacgcggcacagaagccctaccgctgcccggcctgcggcaagggcttcacgcagctcagttcctaccagagccacgagcgcacgcactcgggggagaagcccttcctgtgcccgcgctgcggccgcatgttctccgacccctcgagcttccgtcgccaccagcgcgcccatgaaggggtgaagccataccactgcgagaagtgcggcaaggacttccggcagccggcggacctggccatgcaccggcgtgtgcacacaggcgaccggccgttcaagtgcctgcaatgtgacaagacgttcgtggcgtcctgggacctcaagcggcacgcgctggtgcactctggccagcggcccttccgctgtgaggagtgcgggcgagccttcgccgagcgtgccagcctcacgaagcatagccgggtgcactcgggggagcgccccttccactgtaacgcatgtgggaaatcctttgtggtgtcgtcgagcctgaggaagcacgagcggacccatcgaagcagtgaggccgcgggtgtgccccctgcacaggagctggtggtggggttggcgctgcctgtgggcgtggcaggtgagagttcagccgccccggcagcaggggcggggctgggggaccctccagcagggctgctagggctgcccccggagtcaggtggtgtgatggccacacagtggcaggtggtgggcatgacggtggagcatgtggaatgccaagatgctggtgtccgggaggctcctggtcccttggaaggggcaggcgaggcggggggtgaggaggctgacgagaagcccccccagtttgtgtgccgagagtgcaaggagaccttctccacaatgacgctgctgcgtcggcacgagcgctcacacccggagctccggcccttcccctgcacccagtgcggcaagagcttctctgaccgggctgggctgcgcaaacacagccgcactcacagctcagtgcgcccctacacctgcccccattgtcccaaggccttcttgagtgccagcgacttgcgcaagcatgaacgcacccaccctgtgcccatggggacccccacacccctggagcccctggtggctttgctaggaatgcctgaagaggggccggcctgaagcccatgaccccccagcaccacactccgggagcccagcccccatcgggggcttcctgtacctccttttgcctggctctgctctttagactccagatccctacccctcagcaactagctcccctgtcggccagctaagagagctgggacagtggaggctggcagaagctgagacgtgactgtctaggagtaacactcattaaagctttcattttggcaccaggtc

SEQ ID NO: 629 - protein, 498 aa, Homo sapiens
MQPVCLRVRLASHAGELPFRCAHCPKAYGALSKLKIHQRGHTGERPYACADCGKSFADPSVFRKHRRTHAGLRPYSCERCGKAYAELKDLRNHERSHTGERPFLCSECGKSFSRSSSLTCHQRIHAAQKPYRCPACGKGFTQLSSYQSHERTHSGEKPFLCPRCGRMFSDPSSFRRHQRAHEGVKPYHCEKCGKDFRQPADLAMHRRVHTGDRPFKCLQCDKTFVASWDLKRHALVHSGQRPFRCEECGRAFAERASLTKHSRVHSGERPFHCNACGKSFVVSSSLRKHERTHRSSEAAGVPPAQELVVGLALPVGVAGESSAAPAAGAGLGDPPAGLLGLPPESGGVMATQWQVVGMTVEHVECQDAGVREAPGPLEGAGEAGGEEADEKPPQFVCRECKETFSTMTLLRRHERSHPELRPFPCTQCGKSFSDRAGLRKHSRTHSSVRPYTCPHCPKAFLSASDLRKHERTHPVPMGTPTPLEPLVALLGMPEEGPA

SEQ ID NO: 630 - DNA, 6371 bp, Homo sapiens
caggaagatactgtgttttttcacttgccacccagaaatggaaatggagccacagtatttggtatctcttgctatcgacaaattgaagccaaggcactgaaagtaaggcaagcagatatcaccagagagactgttcagaaaagtgtctgtgttctaagcaagctgcctctgtatggtttacttcaagcaaaacttcaactcattacacatgcatattttgaagagaaggatttttcccaaatttctattctaaaggagctttatgaacatatgaatagttccttgggaggtgcttcattagaaggatcccaagtatatcttggtctgtcacctcgagatcttgtccttcattttcgacacaaggtcttaatcctatttaagctaattcttcttgaaaaaaaggttcttttttatatttctccagtgaataaattggtgggtgcactgatgactgtgttatccctttttccaggcatgattgaacatggtctcagtgactgttctcagtatagaccccggaaaagtatgtctgaagatggtgggcttcaggaaagtaacccatgtgcagatgattttgtttctgcatccactgctgatgtttcacataccaacttgggaactatcaggaaagtcatggcaggaaaccatggagaagatgctgccatgaagactgaggagcctttgttccaagtggaagacagcagcaaagggcaggaacccaatgataccaatcaatatttgaaacctccatctcgcccatctccagattcttcagaaagtgactgggaaactttggatcctagtgtcttagaggaccccaacttgaaagaaagggaacagctgggatcagaccagacaaatttgtttccaaaggactctgtcccctcagagagtcttccaattactgtacaacctcaagctaatacgggacaggtagtcctgataccagggctcatttcgggtttggaagaggatcagtatggcatgcccctggccatcttcacaaagggatatctgtgtttgccttacatggcattgcagcagcatcatcttctctccgatgtcaccgttcgggggtttgttgctggagctactaacatcctttttcgacaacagaaacacctcagtgatgccattgtggaagtagaagaagctctgatccagatccatgatccagaactcaggaagctgcttaacccaaccactgcagacctaaggttcgcagactacctagtgaggcacgtgactgagaatcgggatgacgtcttcctagatggcacgggctgggagggaggtgacgaatggatccgggcccagtttgcggtctacattcatgccctgctggctgccacgctgcaattagttctgttcagaatagtgaacgtggcaaaaaaaattggaaacgtcatggtcacaactagccggaatgttgtacaaacaggaaaagctgttggccagtcagttggaggagctttttccagtgcaaagacagctatgtcttcatggctttccactttcaccacttccacctcccaaagtctcactgagccaccagatgagaagccttgagcaaggcgtcagaggctgctattgctttctgaggtttaagtgtcccctgtctgtctgctgctcccaggctgttactagccacagatccacagcaggggaccatatgtcgaactgtttacatggatgttgctctaagtgaatgtttcgggatgccgaaatgatgaaatcacagccatagcagggatggctttccaggttggggtttcaattgactacttttatttcagtctgagcctgattaaaacatacagtgaaccttctaatgaattttgagttttgatattgtacattggtttactttagaagagtttttacttatgtaaattttgttctgttttggtgtttgaatatctagatggtcactgtaatttatacttgctaaaattaatttatattaccattttctctaaagttggccttaaaacgtgcttataaagtgaaggggtcatacagttgggccttcattattttgctgaattatgtgatgatttttttgctttctacccacaaaacatttattaattcacttcctcccagaaacatgaaagttagaggtggtagttctgaggattgggtgttttgttttacgtttttagtttgttctttccacatccttaaaaacttggtttcagacatcaaggagtatcactgtgctttcctcctctttataactgtgcaggtgggtgtgcagagaaatagcagagtgatggttcgatgatactgaagcagtttaacatgaatgtgtctgtagggcaatactttcaaagaagacctatgtgtttatttttcaaccgcagtcatgttgcagtcttacaagcactttttttttattccagagtttgtgccatctgtttctctttttttttgggggggggggggggcggggtctcactctatcgcccaggctggagtgcagtggtgccatctcggctcactgcaacctccatctcccgggttcaagcaattcttgtacctcagcctcccaagtagctgggattatggacatgcgccaccatgcccagctaattattgtatttttagtagagacggggttttgccatgttggccaggctggtcttgatctcctggcctcaagtgatctgcccgcctcagcctctcaaagtgctgggactacaggcatgagccactgcgcctggcctgtttcttttttaaacagttttctattgggtgtttgcagacctacagcttttctcgtagtcttattcataaagcttttcaaagcacttagtcttctacttccctaactgaaagtcctcctataatcaatccctacccccttctagaagtatcttaaaagaaaagcaaggtgattgtaagtattaaatagaaatctcatcttagtttatattcagcaaagtaagaggcaagagaagaaaactgcagccttgacatctgtcatctgagaaaggacatctggtttcatgttaggcacatacatgcatgtgtgtgccatctactgatgatttgtacacagctggacctcgtgtgtttgccatgctcagctctcatttgcttttcaaggatacctgggatggctgttctcagagagtacttacggggaacagactgccttttagtaacaagggatacttgggaaatacattgtgagtatgatctatcccagattgctggggaaataaaggagggccctgattatatttggtttattcctcactaaatgtttaagaagtaaatgctcccaaggcatttgaaatgaacatagaaacataatctaaatgtctctaaattttccactttgtgttttctaaacacaaattgtattactcatttgagcataactcaagaattcagcgatgataaattgaagggctgaatgtgagaactccattaattccacttcttccaagaaagttaacctcaggaaatactgtttgaagagaagaaagtagtaccaaacaaaaaccttaaacagtacttgaatcttttttgcgctgagactataaagaattcattctaacatcttgtttcataagggccacatcattcgttggagcatgatagtgtgatttgtgtacaattgttacctctcagctgctgaagttcacacttcaaggatctaggagctctgtgaggggtcgtccagcaagatgctgatttgtctttcagttggtatggtttctgtgatcggggtaaactcccgtctcccactattcaaaagcagcccaactcatgctttggaatccactgaaataaaaatagttacatgaagtttaactttgctttaatatcacttgttcctcattgaatatacactttgatcagactttctattaacatttctagctaagagtttgactcttagtggtcactttactgactttccaacataaaacaagtatctcagaagatacagctttcatcatagaaatggtcaaaagaccatagctatatttccttcaggttctgggaggtggagtttttcaaggaacactggccgttgtattgttggcaggggccccaaggcagctcgcacaatcaaaggcaggaagcctcacccctggtcctgtgaccccccccaccccacacacacacatacttcaggcttggattctaggctccaagtggccagcatagaagcagcagcctctctccaaaccctggctctgtgagccataggaaccagcactaggtcatcttctgacatagccctggtgaaggtgtgtgtgtgttggtggccacacttgctaaggcttttgtgtctaagaattgagtatttgtacctaggtgtgagggaaccagggtcagccagcctttttcagatggcgccaggcacacacactacatcaatggcttgctggtggcttcaccactatccaggtgacttaaaagagtgtttggaaaatgtccctggtatacttcaattcctactagacattgtaatgacaatggtgtaggtaaggaagagagagttaaaactaccagttgtggaatagaaatagttgcatgtccaaagaaggcttagaatgattgtgcatatgcagttggctcacataaccagcatgaacagtctctccccaaatccattagtgattcactaccccccgccaagcacagccctaaaacaattctcgtccactttcctgttaagaaacacagcagcaatatactttggcagcaaaccagagcatatgatgtaacttgctcaaccttatcttcctttccaaattctatactaagcatctgatgttttttagaataatttcctttggaaagccaatgagaaaacaaattaggaagagagagaagtgagaaattgttgcatggctgaggaacaagatgcttaaaatctgaatggaagtattttgagagcagtatttcatgtgctaagggttataagaattcttttagaaagggattagaattttactctgctagttacaagttttaaagtcacgctacggcattatcaccctggcaggtaggttttgttattgttttacattttgtgaaaaaaagttttgtagaagttacagctagtggtcttttccctccagagccagtgatgagtgtgggagcacttcagctctgtaaggggccagcgttctgacctttaaccacatgaactaacctgcgtcagcagttgcagaaagtagcctgttaggacagcagctgctaagcgttgcctggtattttagtggggagaaggctgggactcttcatggcatcaacacttgcatgctctgaatctttgatcagagatgaggtgccatttttggcatttccaccccgtctcgtggtagcctttaaaagtggtagaagatgctgccctaattccccgaggatgattgtcattccatgcagcataatgtgccgtgaggagttttctcattccagttctttggacttcgtaacattggaattgtttttccataatttccggcattccataaatatttgtcaaggacaaagaaaaggaatgtggatgtttattcttttcatatgaatgactttgtacacatgacttcctgctttcattatgaaggaggggaaactagttcccttgtatggtaactccaaagttaaaaaattgtgcatgtctgaggggttgaatatattttgtaaaactctaaatacatttgtatttctgtgctgttctaaagtttacctttttacttatatgaaagataactatatatttaaatcatgtaagtggaacacagtgtagggggtttttccaatcttatttttcatcaggttctcacacccacgtagtatgctgctcaaattttttcgtgtgtgcaaatgtgaacatttgaacatttcagttaggtactgagccagaaaaggtaattgaagttttcagaaagcttctgtgcttagaaaatattttgttgttttcttaaaatattagtattttgtagctggaagaataagatcaaggcttacatgtttcaggccacttggtcactggttcctgaatttagaaaacattggattaatgagttggtgaaggcatttagtggttacaaaaacagtttaaatatttatgattaaaggcttttcacaaacctttttaaagaaaatttagctgagaaaacttaaaaagttttctaaggaagtttaactgtggcacatgttttgatcagaaaggtagttctctttgctctggtagttttaaagtttgtactagttctttatttctgttgtttttttaaattgttaaaattataaatcacgtctaatcatactgaattgtaaaacttgaattgtatctttattttaagcataaatgagaataaaatgatcctgttcaccctgcc

SEQ ID NO: 631 - protein, 522 aa, Homo sapiens
QEDTVFFHLPPRNGNGATVFGISCYRQIEAKALKVRQADITRETVQKSVCVLSKLPLYGLLQAKLQLITHAYFEEKDFSQISILKELYEHMNSSLGGASLEGSQVYLGLSPRDLVLHFRHKVLILFKLILLEKKVLFYISPVNKLVGALMTVLSLFPGMIEHGLSDCSQYRPRKSMSEDGGLQESNPCADDFVSASTADVSHTNLGTIRKVMAGNHGEDAAMKTEEPLFQVEDSSKGQEPNDTNQYLKPPSRPSPDSSESDWETLDPSVLEDPNLKEREQLGSDQTNLFPKDSVPSESLPITVQPQANTGQVVLIPGLISGLEEDQYGMPLAIFTKGYLCLPYMALQQHHLLSDVTVRGFVAGATNILFRQQKHLSDAIVEVEEALIQIHDPELRKLLNPTTADLRFADYLVRHVTENRDDVFLDGTGWEGGDEWIRAQFAVYIHALLAATLQLVLFRIVNVAKKIGNVMVTTSRNVVQTGKAVGQSVGGAFSSAKTAMSSWLSTFTTSTSQSLTEPPDEKP

SEQ ID NO: 632 - DNA, 1416 bp, Homo sapiens
gggagactaacactgtgactctgggattggcaggtgcaacttggagccacttaatttcctggggacgtaagttcttcccaagcttagagcaagctgccctgccaaaggagaccaaaccatgccaaccacgctggcaactgctgctgtccagtccctgtgttttctgaccaccgtcactgtgcaactcatcgcctctgccacttaggaccaggaaagaggctggttttgctcccactcttagttgctgataaagtggggagaaggaaaatggacactctacagagtttggggaagggagagtagggagcccatcttgtccagaaagattcatctgtggtctgtctgttaaacacagctgatttcagtgggctttcccctggccctgggggagcagacactgactgggttgtgggcagaggagccatcctggcggagccctgctgcaggggagctccttcaggagccccatccggacctcttgcactgggctgcctttgcctccatttgccttcctgtatctgcaacaaaccttttaaaagtgttcactcttgctttttccagtatttcggtaatcagccatcttgctgtagtacaggatgacattgtcgaatgctctttgtatgtgtgcacacccccttactcccttactgcttcatacactccacaagtggtacagtattttgtgtcattgtaaaaatcaaaattggctttggatctttgtaatacacctgtacctgaaaaagtaaacaacattcttcaattactagccttcagcttgaaaagacatgctggagaagaaggaagggggaacccataggtgtggcgtggagccaagatgtactattcaactatgtgtttctgtttataaaaaacacataccatggaaccatggtgcttttgttcttagtttttgccgttagatcccttcaaactggaagttccttacaatatctttctcaggaaatattttgggaaatggggtaagagatggcaagtgtgagacgggctgtgtcagaggttgctacgtcatggatacagtgcagttccaagtgccataagtgtatgtacatatagttaataatgacactgttcatcaccattctaaaatactgttcttccaaccctatcttcaatgaccagtccagaaggggttaagctggattcatttgctctggcatgtgcattcccagcagggtgaagaaaggtttaaattaaagaatttattttctctctcccccttcctctttctcccagtctttgcataggagaatgttagacattcagaaattactgtttctgttttaaattgagtattgatttttttatattgactttgtattgagttctttttgaaagaataacaaaataaaatgcaggatctttgtaaagcctttaaaaaaaaaaaaaaaaaaaaaa

SEQ ID NO: 633 - protein, 49 aa, Homo sapiens
MTLSNALCMCAHPLTPLLLHTLHKWYSILCHCKNQNWLWIFVIHLYLKK

SEQ ID NO: 634 - DNA, 6158 bp, Homo sapiens
ctcaagtatgtgttaattagcaaaccaactgaatggtcagatgagctgaggcagaagttcctagaagggtttgatgcctttttggaattactaaaatgtatgcagggaatggatccaattacacgtcaagtaggacaacatattgaaatggaaccagagtgggaagcagccttcacactacaaatgaaattaacacatgtcatttcaatgatgcaggactggtgtgcttcagatgaaaaagtgttaatcgaagcttacaagaaatgtctcgctgtactgatgcagtgtcatggtggttatactgatggtgaacagccaatcacactaagcatttgtggacattcagtggaaactatcagatactgtgtttcccaagaaaaagttagcattcacctcccagtttctcgcttacttgcaggtttacatgtattattaagcaaaagtgaagtggcatataaatttccagagctcctacctctaagtgaacttagcccacccatgttgatagaacaccctcttagatgtcttgttctgtgtgcccaagtacatgccggaatgtggagaagaaatgggttctctctagtaaaccagatttattactaccataatgtgaaatgcagacgtgagatgtttgacaaggatgtagtaatgcttcagacaggtgtctccatgatggatccaaatcatttcctgatgatcatgctcagccgctttgaactttatcagattttcagtactccagactatggaaaaagatttagttctgagattacccataaggatgttgttcagcagaacaatactctaatagaagaaatgctatacctcattataatgcttgttggagagagatttagtcctggagttggacaggtaaatgctacagatgaaatcaagcgagagattatccatcagttgagtatcaagcctatggctcatagtgaattggtaaagtctttacctgaagatgagaacaaggagactggcatggagagtgtaatcgaagcagttgcccatttcaagaaacctggattaacaggacgaggcatgtatgaactgaaaccagaatgtgccaaagagttcaacttgtatttctatcacttttcaagggcagaacagtccaaggcagaagaagcgcaacggaaattgaaaagacaaaatagagaagatacagcactcccacctccggtgttgcctccattctgccctctgtttgcaagcctggttaacattttgcagtcagatgtcatgttgtgcatcatgggaacaattctgcaatgggctgtggaacataatggatatgcctggtcagagtccatgctgcaaagggtgttacatttaattggcatggcactacaagaagaaaaacaacatttagagaatgtcacggaagagcatgtagtaacatttaccttcactcagaagatatcaaaacctggtgaagcgccaaaaaattctcctagcatactagctatgctggaaacactacaaaatgctccctacctagaagtccacaaagacatgattcggtggatattgaagacttttaatgctgttaaaaagatgagggagagttcacctaccagtcccgtggcagagacagaaggaaccataatggaagagagttcaagggacaaagacaaagctgagaggaagagaaaagcagagattgccagactgcgcagagaaaagatcatggctcagatgtctgaaatgcagcggcattttattgatgaaaacaaagaactctttcagcagacattagaactggatgcctcaacctctgctgttcttgatcatagccctgtggcttcagatatgacacttacagcactgggtcccacacaaactcaggttcctgaacaaagacaattcgttacatgtatattgtgtcaagaggagcaagaagttaaagtggaaagcagggcaatggtcttggcagcatttgttcagagatcaactgtattatcaaaaaacagaagtaaatttattcaagatccagaaaaatatgatccattattcatgcaccctgatctgtcttgtggaacacacactagtagctgtgggcacattatgcatgcccattgttggcaaaggtattttgattccgttcaagctaaagaacagcgaaggcaacagagattacgcttacatacgagctatgatgtagaaaacggagaattcctttgccccctttgtgaatgcttgagtaatactgttattcctctgctgcttcctccaagaaatatttttaacaacaggttaaatttttcagaccaaccaaatctgactcagtggattagaacaatatctcagcaaataaaagcattacagtttcttaggaaagaagaaagtactcctaataatgcctctacaaagaattcagaaaatgtggatgaattacagctccctgaagggttcaggcctgattttcgtcctaagatcccttattctgagagcataaaagaaatgctaacgacatttggaactgctacctacaaggtgggactaaaggttcatcccaatgaagaggatcctcgtgttcccataatgtgttggggtagctgcgcgtacaccatccaaagcatagaaagaattttgagtgatgaagataaaccattgtttggtcctttaccttgcagactggatgactgtcttaggtcattgacgagatttgccgcagcacactggacagtggcatcagtttcagtggtgcaaggacatttttgtaaactttttgcatcactggtgcctaatgacagccatgaggaacttccatgcatattagatattgacatgtttcatttattggtgggcttggtgcttgcatttcctgcgttgcagtgtcaggatttttcagggatcagccttggcactggagaccttcacattttccatctggttactatggcacacatcatacagatcttacttacctcatgtacagaagagaatggcatggatcaagaaaatcccccttgtgaagaagaatcagcagttcttgctttgtataaaacacttcaccagtatacgggaagtgccttgaaagaaataccatccggctggcatctgtggaggagtgtcagagctggaatcatgcctttcctgaagtgttctgctttattttttcattacttaaatggagttccttccccacccgacattcaagttcctggaacaagccattttgaacatttatgtagctatctttccctaccaaacaacctcatttgcctttttcaagaaaatagtgagataatgaattcactgattgaaagttggtgccgtaacagtgaagttaaaagatatctagaaggtgaaagagatgctataagatatccaagagaatctaacaaattaataaaccttccagaggattacagcagcctcattaatcaagcatccaatttctcgtgcccgaaatcaggtggtgataagagcagagccccaactctgtgccttgtgtgcggatctctgctgtgctcccagagttactgctgccagactgaactggaaggggaggatgtaggagcctgcacagctcacacctactcctgtggctctggagtgggcatcttcctgagagtacgggaatgtcaggtgctatttttagctggcaaaaccaaaggctgtttttattctcctccttaccttgatgactatggggagaccgaccagggactcagacggggaaatcctttacatttatgcaaagagcgattcaagaagattcagaagctctggcaccaacacagtgtcacagaggaaattggacatgcacaggaagccaatcagacactggttggcattgactggcaacatttataattattgcaccaccaaaaaacacaaacttggatttttttaacccagttggctttttaagaaagaaagaagttctgctgaatttggaaataaattctttatttaaactttccttcccagttttatagtttctggttctgaggactgatgaaaatcatcttccatcagcagattttcttgcactgtttgctgtgcccctcaaatataatgtcttgggttttaagatcgagcaaggagcttctcttcctagattggatcccagcccctttgtgggggtctgactgcatagtcccagccattatgtgatatttcacgttattgatgatagtgaaccgtgggtccgaagctgactcaacggaggcagggaacaaagtctctgtggtctgttgggtcatacttcctggttccactgagtggcccaacactgggactgggttggtgtcccctctgctgacaggaccctactcctaggagcaaagtggttgattttgaaggcagtgttcccttctctccattgactatgagagagttgggggacacacatgcagaagaagcccgtggggagaaggtggattcctggtgtgctggctggtttttcagggctgttagaggttttttttttcttttttttttttatggcaagacttttggctttgagaaaactcacttagagggctttccaaaaacttaggatggtctaaaaaattaggatattcttttagaattaggaagaaaaattaggatattctaaaagaatatggattaaaaatttaggatattcttttagatatcctaatatctagatgagaggccttccttcataagatctggttgtttgggctgtggttggcataagtgatatttattttggcctctgtcacatccagtttcttgagcttttaaggtaagcttcttttggctttttttcagatgttcaccaagcttaagtttaaaataataggtattctaaaagagtatcctaattttcttatctgtattcttttagaataccctaatgtttcagacagtgatattctcttgttatttctaaggctaaattggcagagtagatcatctaaagccaaacactgaagaaggtgagaacccactcccacccagccagcatttcctggaacagacaagctgctgcttccttgctggctcacttagtgcattcctgggatggtctggcacccaggctttttattctttttgatcattgttcttactgaggtgccttcctagaacaagagccacttacaaaatagcttataattattatgtaccacacaactactattgtttgatgtatgactgctgagagcttgaatacatgcagagagtgactgaagacttagtagaggaataaattctgagcctgtctaaggtggggctaaggaacagatgagtaataagaggctcttggatttttttaaccaatgcaactgaccctttcaatcagttttctttgaattacatctacaagttttgttccactcagctaccagtcaactaggcatgctccacagtatcacaggaagaaggtcagaaatctggaactgaagctaaaagaagtgaggatgtagaagccacattcctctccaaggtagtgtgtgaaagaaccgccccctcttgacaggaggatgaccgtcgccattcttgcgtgggactgactcacccagctgagaggaggaccaatagaaagaaaattcacatttgagtccacctctctccccctttttctgaccttcattcataagatctggttgtttgggctgtaggtggcataattcatgtttattttggcctctgtcacatccagtttctttagcttttaaggtaagcttcttttggctttttttcatatgttcaccaagctaaaatttaaaataataagaccaggtttctctctctacaagtggattataaacattttcaccaaatcataacaatactccagctttccggtccgacttcctaggagcctggagttagcaaaggttgtctctggatttcattctctgagaatatcacagagcctgggagaagatgaatttacatgaaattgcaacatacacacctttttattttctggtgttaagctagttgtctttcctaccttacaaatcatgttagttttatgatttgttccgcatgttttatgtttattgtagaaatgtttatataacatacgctttccatatcagggaaaatcatatctgtttaataaattggctataactttaatatctgtggacaacttgtaaaatttggaatgtatcatatgtaaaaagtttaaagatatccaaataaatgctttaggtgttggcatt

SEQ ID NO: 635 - protein, 1275 aa, Homo sapiens
LKYVLISKPTEWSDELRQKFLEGFDAFLELLKCMQGMDPITRQVGQHIEMEPEWEAAFTLQMKLTHVISMMQDWCASDEKVLIEAYKKCLAVLMQCHGGYTDGEQPITLSICGHSVETIRYCVSQEKVSIHLPVSRLLAGLHVLLSKSEVAYKFPELLPLSELSPPMLIEHPLRCLVLCAQVHAGMWRRNGFSLVNQIYYYHNVKCRREMFDKDVVMLQTGVSMMDPNHFLMIMLSRFELYQIFSTPDYGKRFSSEITHKDVVQQNNTLIEEMLYLIIMLVGERFSPGVGQVNATDEIKREIIHQLSIKPMAHSELVKSLPEDENKETGMESVIEAVAHFKKPGLTGRGMYELKPECAKEFNLYFYHFSRAEQSKAEEAQRKLKRQNREDTALPPPVLPPFCPLFASLVNILQSDVMLCIMGTILQWAVEHNGYAWSESMLQRVLHLIGMALQEEKQHLENVTEEHVVTFTFTQKISKPGEAPKNSPSILAMLETLQNAPYLEVHKDMIRWILKTFNAVKKMRESSPTSPVAETEGTIMEESSRDKDKAERKRKAEIARLRREKIMAQMSEMQRHFIDENKELFQQTLELDASTSAVLDHSPVASDMTLTALGPTQTQVPEQRQFVTCILCQEEQEVKVESRAMVLAAFVQRSTVLSKNRSKFIQDPEKYDPLFMHPDLSCGTHTSSCGHIMHAHCWQRYFDSVQAKEQRRQQRLRLHTSYDVENGEFLCPLCECLSNTVIPLLLPPRNIFNNRLNFSDQPNLTQWIRTISQQIKALQFLRKEESTPNNASTKNSENVDELQLPEGFRPDFRPKIPYSESIKEMLTTFGTATYKVGLKVHPNEEDPRVPIMCWGSCAYTIQSIERILSDEDKPLFGPLPCRLDDCLRSLTRFAAAHWTVASVSVVQGHFCKLFASLVPNDSHEELPCILDIDMFHLLVGLVLAFPALQCQDFSGISLGTGDLHIFHLVTMAHIIQILLTSCTEENGMDQENPPCEEESAVLALYKTLHQYTGSALKEIPSGWHLWRSVRAGIMPFLKCSALFFHYLNGVPSPPDIQVPGTSHFEHLCSYLSLPNNLICLFQENSEIMNSLIESWCRNSEVKRYLEGERDAIRYPRESNKLINLPEDYSSLINQASNFSCPKSGGDKSRAPTLCLVCGSLLCSQSYCCQTELEGEDVGACTAHTYSCGSGVGIFLRVRECQVLFLAGKTKGCFYSPPYLDDYGETDQGLRRGNPLHLCKERFKKIQKLWHQHSVTEEIGHAQEANQTLVGIDWQHL

SEQ ID NO: 636 - DNA, 3548 bp, Homo sapiens
gaacccaggaggcagagcttgcagtgagccgagactgcgccaccgcgctccagcctgggtgacagagcgagaccccatctcaaaaaaaaaaaagttaggccgagcatggtgactcacatctgtaatcccagcactttgggagaccaaggcgagaagatggcttgaggccaggaattcaaggccagcctgggcaacatagacctctgtctctataaaaaatacaaaaaattggatgggtatggtggcatgtgcctgtagtcccagctactctggagtctgaggcgagaggttcacttgggcccgggaggtcaaggttgcagtgagctgtcattgcgccactgcaaaccagcctgggcaatagagtgagaccctgtctctatgaactgtgtggtcagtcagctgtggagctccgtatgctggccaagttctgatgtgctctctggacctccaaggtcaggacatgggggtccactggccctgtggggacaggcatgcattttttaccccagctcagccaccatctccctgcctgcggtacacctggcccctgtccccaccacatcccaccacctgtacaatgggacccttgggtaccatgccatcagttgctggtgaggcccaggtgagttcgttcctgtaatgcccttaggaaagtacctgtcaccagaaatttttaaagctctcaaggtgattccaatgcggagctggggctgagatgctccaggttttgaggactttggccaagggcgtgaacctcttagaggaggaatggctgggcaataatgggggctttgctcaccactttagctcaggactctcaacccccctttaaaatgaggtgcaaaataaatttaagggacttgaactcagggaacactttttgtagttgttgatacaggatctcactctgctgcccaggctggagtacagtggcacaatcacagctcactgaagtctcgacctcccaggctcaagcgatcctcctgcctcagacaccagagtagctgggaccacaggtgtgtgccaacacacctggctaattttttgtagagacaaggtttccctacatttcccaggctggtcttgaactcctggactcaagcgactgacccgtctcagcctcccaaggtgttgggaccacaggcgtgaaccactgtgtccacccctgcctctattttttttaaaaagaaagttagattaggaagcagattcaggtttattaaattatgcttgtaaatgaaagaatcttttgttattccattttataatctttcaaaggaacaggttagaagagccaaccattctgatcagttaggatgggaatgatggtttgagatacctgaccagggcatcctgtggttatggccttaatgtggatttcttctgttgagatgcagattcctcagagtccgtgtcatcttaggaacggtctgatctttacgtattctggatgctaaatcttagtccagccaaacaggaatgacaatggccaaagcatcaactatagaaaacataatctatgggggttataatttatattcataacaagtgcaaacccatggaatatctgagagcactgcacatgcatcgtgccgtggagagttttgaaattagacatggtgagtatggtacttactggacactgaattcctgctctagcaattgagtactacagaataaattatttaacttccataaacctaattttccttatctaaaaataaagaaaacaagtctaatctttttggcaatttttaaaatttatttttttactgatttcttatcagttgatttttgaggattaaaaaaattactatgagttggccgggcgcggtggctcacacctgtaatcctagcactttgggaggccgaggcgggcggatcatgaggtcaggagattgagaccatcctggctaacatggtgaaaccccgtctgtactaaaaatacaaaaaaaattagctgggcatggtggcaggcgccagtagtcccagctacttgggaggcctaggcaggagaatggtgtgaacccgggaggcagagcttgtggtgagccgagatcgcgccactgcactccaggcctgggtgacagtgcgagaccctgtctcaaaaaaaaaaaaaaaattactatggccaagccacatgaatgtacatgaattgcagatctaagaaggaatgttcttgggcaaaattcacattttaaataatgtaaaacaaggttgttgctttgacactctccctgctttagcttaaatttaaattagagaaaggatatatattctgccatagaaatgctacatgtacatttttctgttctaatcatagcataagaaaccaggagttatttaaaatcgttaaacctattggtaaattacagtcagaaaaagataacattatgtcaaaataaaaattgtttctgagaaacactcttcaacattaaaatgaacaattttacatctattcaaaagggtcttctattcagctatttaggggccatatactacattatatagcatctcaatattagacattctgtaggagtcttaggtttttttgtggcttaagtaaccaattgatactacttgccctcaacatttttctagaccaaaattacctttgccacagaattctgagatctcacccaagctcctgtccaagcatctgagcagatccaaagactattagtgaatcacatcccagttcacaagcttttccatagccaactccatctagatacaaattagcagcctccctcagcaaaaatacaaatcatgctccagaatttttagaatggattatcaacctgcaacctagatgtccagttcctaacagacacaaatccttcctcaatcaatacagagcaaacacacttagggaattttccagaaattcagtcctgatttgtctgccatccagatcctataaacaaccacctaaagggagatatttaaaacatttgttcccataggttctccaagttctcaccttgaaacagattaaagaactagaaaaaagagacttaagatcattttttagtaggaaggctttataaaattagagctcattatgttcagtttttattcagttttaaaatatacaaagctgactctaggcaaatactatgcaaccactctctattacatttctcaacacctcttacgtaaagataagaatgataatgtacttatttacaaggttttaataccacaatgagtttgcattttaaagaaatatttaatctaaaagaaaactcacgtaactacagaggtttttatattactaaagactctactgacctatcttcaaagctcataaaatataaatatatttcagataaaccaattacatttttaaaagaaaaataataaccagatattattcaaggcttaacaataacttgtctacttaaaaaaaaattacctgtagtagccctccatcatcaaaacgcagtacttctattatgctctctgactgaacgaatgcttccttctcggcccgcgccgcagccactacgagggtcatcaccaggtgcagcgctcctaggaggccg

SEQ ID NO: 637 - protein, 78 aa, Homo sapiens [sequence omitted]

SEQ ID NO: 638 - DNA, 1672 bp, Homo sapiens
taaagaattaatttgctttattgaaaaaagttgtttctttaaacatttaaataattactttttcttcagtgacaaattagtttactttaatgaaaaaaaaggtttttttcataactttcattacatgaacctttagcaaaggagatttctcccattatatacttcttatgatcaacaaattccatcatctccccactaagagaaagtactccaagatgatagaatgattttaaagttatgggactacaacagcagccacaggaaccttgagtaagtaccatgaaccctgaccctcagcgttaatttgtaagcctttggcagtgagatggaatgtcttccttcagtttgaaacaaaggaaacctattgcatcgcacgtaaatttgtatattgatgctatattgactttgtagctgccatgccttcacacagacacctcatccagcccccactgttccacttattgtgatggtttgtatatctttatttcaaagaagatctgtttgaaccgtgtttaatttcttctttgacctgctttcatcactgcccatgcctaccctggtggcattctcatccacgagactaccacatccatgccactaggtggcattctcatccatgagactactgcacccgtgcgcacgtcaagaagtagccaagccatgggctggattgtgcttttcctgagaggatgaaaggcttcatggatacatgctagtatccatgttcctctattctcaagtcaggcaccaagatgatgtttcatacctgcctgcctttcaaagtctcataaatgttcattgaatatccactctatgcaaggcactaggtagtcacagaggcaaggtttgagctaaactacaggccctgccctccaggagctcccggtctcatggcagggtgcagaagccagaatagagggccatggcatgggagagaactctgctgaccgggagctctgaagggttaggggtccatgagcctgatttatggggtcgttgccataggattaggggctccctggcatacagtgaatggagagactagcattgctgtgttatttcactgagagggcaccaatgttcagcctctgagaccaggggaggaaagcagtggccatgaatgttccctcccatcccggggactgactgggctcctcccacagtctcagacacagaggaagaagtgtactcacactgccccaacaccagtgagtggaaatatttataggtctctcatttggttttaatttttatttttttatttttcagaaattaaaaaaaaaatcacactcacaaaattaaccattacccacattcctaccaacaagaagtaaccattcttaaccttgtaatatgttggtttccagatttatgtttatgctttaaaaaattatgcagacaacatattagcacattgccccttttctcatttgttttaatccatgttcttcccatttatacaggagcaattcttgcattcagttatgggatactataaatgcctagtataatggcagcagagagaattactatggttgtataccttttctcgctccttgctcctcaaatgccttagagtttaaaatctattgtggaaagtttgtgaaatgcagaacggtgaaaataaacaaattaccagtggttaaaaaaaaaaaaaaaaaaaaaaaaaaaa

SEQ ID NO: 639 - DNA, 4736 bp, Homo sapiens
agcggaagtcagcgctggagtcggctaggcggctggaaacggcggctgccgccggtgactcagggaggcgggaggcgggggaggagctcttcctgcaggcgtggaaaccatggtgctcacgctcggagaaagttggccggtattggtggggaggaggtttctcagtctgtccgcagccgacggcagcgatggcagccacgacagctgggacgtggagcgcgtcgccgagtggccctggctctccgggaccattcgagctgtttcccacaccgacgttaccaagaaggatctgaaggtgtgtgtggaatttgatggggaatcttggaggaaaagaagatggatagaagtctacagccttctaaggagagcatttttagtagaacataatttggttttagctgaacgaaagtcacctgaaatttctgaacgaattgtacagtggcctgcaataacgtacaaacctctgttggacaaagctggtttgggatccataacttctgttcgctttctgggagatcaacaaagagtatttctttctaaagaccttttgaagcctatacaggatgtaaacagtcttcgactttctcttacggataatcagattgtcagtaaagaatttcaagctttgattgtgaagcatttagatgaaagccatcttttaaaaggtgacaaaaacttagttggttcagaagtaaaaatttatagcttggacccatctactcagtggttttcagcaaccgttgtaaatggaaacccagcatcaaaaactcttcaagtcaactgtgaggagattccagcactgaaaattgttgatccgtcactgattcatgttgaagttgtacacgataaccttgtgacatgtggtaattctgcaagaattggagctgtaaaacgcaagtcttctgagaataatggaaccctggtttccaaacaagcaaaatcttgctctgaggcctctcccagtatgtgtcctgtgcagtctgtacctacaacagtttttaaggagatactgcttggctgtactgcagcaactccacctagtaaggacccaagacagcaaagtactccccaggctgccaactctccacctaaccttggagcaaaaattcctcaaggatgtcataaacaaagtttaccagaggaaatttcttcctgtctaaatacaaagtctgaagctctgagaacaaaaccagatgtctgcaaagcagggttgctctcaaagtcctctcagattggaactggagacttgaaaattctgactgagccaaaaggcagctgtactcagcctaagacaaacactgatcaggaaaacagattggagtctgttccacaagcattgactggccttcctaaggagtgcttacctacaaaggcttcttctaaggcagaattggaaattgccaatcctcctgaactgcagaagcacctagaacatgcaccttccccatcggatgtttcaaatgcaccagaagtgaaagcaggtgtcaatagtgatagccctaataactgttcaggaaaaaaggtagaaccttcagctttagcttgccgatcacagaatttaaaggaatcttcagtaaaagtagataatgaaagctgttgttcaagaagcaacaataaaatccagaatgccccatccaggaagtcggttttgacagacccagctaaactcaaaaagctgcaacagagtggcgaggccttcgtacaggatgattcttgtgtgaacatcgtggcacagttgcctaaatgccgagagtgtcgcttggacagtctccgcaaggataaggagcaacagaaggactcacctgtgttttgccgcttctttcacttcaggaggttacaattcaacaaacatggtgtgttgcgggtagaaggcttcttaacaccaaacaagtatgacaatgaagcaattggcttgtggttacctttaaccaaaaacgttgtggggattgatttggacacagcaaagtacatcttggccaacattggagaccacttctgtcaaatggtgatttctgaaaaggaagctatgtcaactattgagccacacagacaggttgcttggaagcgagctgtcaaaggtgttcgagaaatgtgtgatgtgtgcgacaccaccatcttcaacctgcactgggtgtgtcctcggtgtgggtttggagtatgtgtggactgctaccggatgaagagaaagaattgccaacagggtgctgcttacaagactttctcttggctaaaatgtgtgaagagtcagatacatgaaccagagaacttaatgcccacacagatcattcctggaaaagcactctatgatgttggagacattgttcattctgtaagagcgaaatggggaataaaggcaaactgcccttgttcaaacaggcaattcaaactcttttcaaagccagcctcaaaggaagacctaaaacagacttctttagctggagaaaaaccgactcttggtgcagtgctccagcagaatccctcagtgttggagccagcagctgtgggtggggaagcagcctccaagccagccggcagcatgaagcctgcctgtccagccagcacatctcctctaaactggctggccgacctaaccagcgggaatgtcaacaaggaaaacaaggaaaaacaaccaacaatgccaattttaaagaatgaaatcaaatgccttccacccctcccacctttaagcaaatccagcacagtcctccatacgtttaacagcacaattttgacacccgtaagcaacaacaattctggtttcctccggaatctcttgaattcttctacaggaaagacagaaaatggactcaagaatacaccaaaaatccttgatgacatctttgcctctttggtgcaaaataagacgacttctgatttatctaagaggcctcaaggactaaccatcaagcccagcattctgggctttgacactcctcactattggctttgtgataatcgcttgctgtgcttgcaagaccccaacaataagagcaactggaatgtgtttagggagtgctggaaacaagggcagccagtgatggtgtctggagtgcatcataaattgaactctgaactttggaaacctgaatccttcaggaaagagtttggtgagcaggaagtagacctagttaattgtaggaccaatgaaatcatcacaggagccacagtaggagacttctgggatggatttgaagatgttccaaatcgtttgaaaaatgaaaaagaaccaatggtgttgaaacttaaggactggccaccaggagaagattttagagatatgatgccttccaggtttgatgatctgatggccaacattccactgcccgagtacacaaggcgagatggcaaactgaatttggcctctaggctgccaaactactttgttcggccagatctgggccccaagatgtataatgcttatggattaatcactcctgaagatcggaaatatggaacaacaaatcttcacttagatgtatctgatgcagctaatgtcatggtctatgtgggaattcccaaaggacagtgtgagcaagaagaagaagtccttaagaccatccaagatggagattctgacgaactcacaataaagcgatttattgaaggaaaagagaagccaggagcactgtggcacatatatgctgcaaaggacacggagaagataagggaatttcttaaaaaggtataagaagagcaaggtcaagaaaacccagcagacaacgatcctattcatgatcaaagctggtatttagaccgatcattaagaaaacgtcttcatcaagagtatggagttcaaggctgggctattgtacagtttcttggggatgtggtgtttatcccggcaggagctccacatcaggttcataacttatatagctgcatcaaagtggctgaagattttgtttctccagagcatgttaaacactgcttctggcttactcaggaattccgatatctgtcacagactcataccaatcacgaagataaattacaggtgaagaatgttatctaccatgcagtgaaagatgcagttgctatgctgaaagccagtgaatccagttttggcaaaccttaatctccctgcacattggaaatgaattacaggcagctgttcaaactcttcaggcaggattcctgtggactttgagattcatgttacctcatcttcttttttaaactgtacccaacttgtgagggtactctgtctaatgtatatttctagtgtttacagacagtaaatgtgtatatgtagtaactatttacagaacatgcatccttaaactgtgacttctcacctagtgcagaacttttaccaggctgtaaaagcaaaacctcgtatcagctctggaacaatacctgcagttattcttcagctgtttggacaacttagattgggtttataactattaggaatcactgcacagtttatttgggttgtgttttgtgtctgagtcccctccctcatcccttagggtccagaagagcaatggaggaagtgacagctaatgttgcagttcttattgtatggcataggactggcattatatagcagaaatcaactactgtacaatttcttggggttaaccatctttagttaaatggaattttaatttaaatgacgctttgctaattttaagtgttaagcattttgcattaaaatattcatataataaaaaaaaaaaaaaaaaaaaaaaaaaaaaaaaaaaaaaaaaaaaaaaaaaaaaaaaaaaaaaaaa

SEQ ID NO: 640 - protein, 1192 aa, Homo sapiens
MVLTLGESWPVLVGRRFLSLSAADGSDGSHDSWDVERVAEWPWLSGTIRAVSHTDVTKKDLKVCVEFDGESWRKRRWIEVYSLLRRAFLVEHNLVLAERKSPEISERIVQWPAITYKPLLDKAGLGSITSVRFLGDQQRVFLSKDLLKPIQDVNSLRLSLTDNQIVSKEFQALIVKHLDESHLLKGDKNLVGSEVKIYSLDPSTQWFSATVVNGNPASKTLQVNCEEIPALKIVDPSLIHVEVVHDNLVTCGNSARIGAVKRKSSENNGTLVSKQAKSCSEASPSMCPVQSVPTTVFKEILLGCTAATPPSKDPRQQSTPQAANSPPNLGAKIPQGCHKQSLPEEISSCLNTKSEALRTKPDVCKAGLLSKSSQIGTGDLKILTEPKGSCTQPKTNTDQENRLESVPQALTGLPKECLPTKASSKAELEIANPPELQKHLEHAPSPSDVSNAPEVKAGVNSDSPNNCSGKKVEPSALACRSQNLKESSVKVDNESCCSRSNNKIQNAPSRKSVLTDPAKLKKLQQSGEAFVQDDSCVNIVAQLPKCRECRLDSLRKDKEQQKDSPVFCRFFHFRRLQFNKHGVLRVEGFLTPNKYDNEAIGLWLPLTKNVVGIDLDTAKYILANIGDHFCQMVISEKEAMSTIEPHRQVAWKRAVKGVREMCDVCDTTIFNLHWVCPRCGFGVCVDCYRMKRKNCQQGAAYKTFSWLKCVKSQIHEPENLMPTQIIPGKALYDVGDIVHSVRAKWGIKANCPCSNRQFKLFSKPASKEDLKQTSLAGEKPTLGAVLQQNPSVLEPAAVGGEAASKPAGSMKPACPASTSPLNWLADLTSGNVNKENKEKQPTMPILKNEIKCLPPLPPLSKSSTVLHTFNSTILTPVSNNNSGFLRNLLNSSTGKTENGLKNTPKILDDIFASLVQNKTTSDLSKRPQGLTIKPSILGFDTPHYWLCDNRLLCLQDPNNKSNWNVFRECWKQGQPVMVSGVHHKLNSELWKPESFRKEFGEQEVDLVNCRTNEIITGATVGDFWDGFEDVPNRLKNEKEPMVLKLKDWPPGEDFRDMMPSRFDDLMANIPLPEYTRRDGKLNLASRLPNYFVRPDLGPKMYNAYGLITPEDRKYGTTNLHLDVSDAANVMVYVGIPKGQCEQEEEVLKTIQDGDSDELTIKRFIEGKEKPGALWHIYAAKDTEKIREFLKKV

SEQ ID NO: 641 - DNA, 2370 bp, Homo sapiens
ccccgcccgtttgccagcgctcaggcaggagctctggactgggcgcgccgccgccctggagtgagggaagcccagtggaagggggtcccgggagccggctgcgatggacgccgtcttggaacccttcccggccgacaggctgttccccggatccagcttcctggacttgggggatctgaacgagtcggacttcctcaacaatgcgcactttcctgagcacctggaccactttacggagaacatggaggacttctccaatgacctgttcagcagcttctttgatgaccctgtgctggatgagaagagccctctattggacatggaactggactcccctacgccaggcatccaggcggagcacagctactccctgagcggcgactcagcgccccagagcccccttgtgcccatcaagatggaggacaccacccaagatgcagagcatggagcatgggcgctgggacacaaactgtgctccatcatggtgaagcaggagcagagcccggagctgcccgtggaccctctggctgccccctcggccatggctgccgcggccgccatggccaccaccccgctgctgggcctcagccccttgtccaggctgcccatcccccaccaggccccgggagagatgactcagctgccagtgatcaaagcagagcctctggaggtgaaccagttcctcaaagtgacaccggaggacctggtgcagatgcctccgacgccccccagcagccatggcagtgacagcgacggctcccagagtccccgctctctgcccccctccagccctgtcaggcccatggcgcgctcctccacggccatctccacctccccactcctcactgcccctcacaaattacaggggacatcagggccactgctcctgacagaggaggagaagcggaccctgattgctgagggctaccccatccccacaaaactccccctcaccaaagccgaggagaaggccttgaagagagtccggaggaaaatcaagaacaagatctcagcccaggagagccgtcgtaagaagaaggagtatgtggagtgtctagaaaagaaggtggagacatttacatctgagaacaatgaactgtggaagaaggtggagaccctggagaatgccaacaggaccctgctccagcagctgcagaaactccagactctggtcaccaacaagatctccagaccttacaagatggccgccacccagactgggacctgcctcatggtggcagccttgtgctttgttctggtgctgggctccctcgtgccctgccttcccgagttctcctccggctcccagactgtgaaggaagaccccctggccgcagacggcgtctacacggccagccagatgccctcccgaagcctcctattctacgatgacggggcaggcttatgggaagatggccgcagcaccctgctgcccatggagcccccagatggctgggaaatcaaccccggggggccggcagagcagcggccccgggaccacctgcagcatgatcacctggacagcacccacgagaccaccaagtacctgagtgaggcctggcctaaagacggtggaaacggcaccagccccgacttctcccactccaaggagtggttccacgacagggatctgggccccaacaccaccatcaaactctcctaggccatgccaagacccaggacataggacggacccctggtacccagaagaggagttcttgctcactaacccggatccgcctcgtgcccctgcctcctggagcttcccattccaggagaaaaggctccacttcccagcccttccttgcccctgacatttggactcttcccttgggccgaccactctgttctcattctccttcccaccaacatccatccgtccttctcagacaaaccactcactgggtaccccacctcctctctcatatgcccaacacgaccactgcctccctgcccccacacctgcacccaaacagacacatcaacgcaccccactcacagacaccccttaccccacccccactgtacagagaccaagaacagaaattgtttgtaaataatgaaccttattttttattattgccaatcccctaagatattgtattttacaaatctccctcttcccttcgcccctcccttgttttatattttatgaagttagtgcgggctttgctgctccctggcccaggaaagagggactacctgaccctcacctggcacccccctgctgctgcccaagccgctgggcctttttaattgccaaactgctctcttcatcagctcagcacatgctttaagaaagcaaacccaaaaaaaaaaaaaaaaagatgcagcatcaaaaaaaaaaaaaaaaaaaaaaaaaaaaaaaaa

SEQ ID NO: 642 - protein, 519 aa, Homo sapiens
MDAVLEPFPADRLFPGSSFLDLGDLNESDFLNNAHFPEHLDHFTENMEDFSNDLFSSFFDDPVLDEKSPLLDMELDSPTPGIQAEHSYSLSGDSAPQSPLVPIKMEDTTQDAEHGAWALGHKLCSIMVKQEQSPELPVDPLAAPSAMAAAAAMATTPLLGLSPLSRLPIPHQAPGEMTQLPVIKAEPLEVNQFLKVTPEDLVQMPPTPPSSHGSDSDGSQSPRSLPPSSPVRPMARSSTAISTSPLLTAPHKLQGTSGPLLLTEEEKRTLIAEGYPIPTKLPLTKAEEKALKRVRRKIKNKISAQESRRKKKEYVECLEKKVETFTSENNELWKKVETLENANRTLLQQLQKLQTLVTNKISRPYKMAATQTGTCLMVAALCFVLVLGSLVPCLPEFSSGSQTVKEDPLAADGVYTASQMPSRSLLFYDDGAGLWEDGRSTLLPMEPPDGWEINPGGPAEQRPRDHLQHDHLDSTHETTKYLSEAWPKDGGNGTSPDFSHSKEWFHDRDLGPNTTIKLS

SEQ ID NO: 643 - DNA, 1816 bp, Homo sapiens
agagtttcggaggcggtgaccgtgacgtagaaggtggagaccgcttcaccctgatcagggagtatcggctgcgggtgcgcaaggcgtccaggagtgacctggggctgtggagagcgacccgtggccttgtgtttcagagtttaccacctaggatgacttcagtgactagatcagagatcatagatgaaaaaggaccagtgatgtctaagactcatgatcatcaattggaatcaagtctcagtcctgtggaagtgtttgctaaaacaatctgccagttatcaagacaggaggcaatcctggcggcgagcaagtatgaaagaaacgaaccggcggaagtcgctgcatcccattcaccagggcatcacagagctcagccggtctatcagtgtcgatttagcagaaagcaaacggcttggctgtctcctgctttccagtttccagttctctattcagaaacttgaacctttcctaagggacactaagggcttcagtcttgaaagttttagagccaaagcatcttctctttctgaagaattgaaacattttgcagacggactggaaactgatggaactctacaaaaatgttttgaagattcaaatggaaaagcatcagatttttctttggaagcatctgtggctgagatgaaggaatacataacaaagttttctttagaacgtcagacttgggatcagctcttgcttcactaccagcaggaggctaaagagatattgtccagaggatcaactgaggccaaaattactgaggtcaaagtggaacctatgacatatcttgggtcttctcagaatgaagttcttaatacaaaacctgactaccagaaaaattacagaaccagagcaaagtctttgactgtatggagttggtgatggatgaactgcaaggatcagtgaaacagctgcaggcctttatggatgaaagtacccagtgcttccagaaggtgtcagtacagctcggaaagagaagcatgcaacaattagatccctcaccagctcgaaaactgttgaagcttcagctacagaacccacctgccatacatggatctggatctggatcttgtcagtgactttatgagagtttctgccacaaggtgcccaagaggagaggaatgggaagagtgccccagcacgtggtgactgcgtgatttctgctcgttgcctttgaagataactggcaggactgactgtagaacactttgacttttttcaaaaagtgatggaatttgtacatccaaatgaatattgtatagacaattttcccaggaatgtgcaaaatgcttgaaagttcaaacttcttttttgaaatgatcttcagatccagtggcccattcttttatctttatcctgtgaaggtgtttttcaggttttgaaacaatccaaaaatcatttaggaccaagtctaaggaaacattttagtggccaagttggattccgattgtaaaggaatgatactaattttctagcatggctctgaaggtgattttaggtagaagagttttgaggctgggcgcaatggctcacgcctgtaatcctagcattttgggtgactgaggcgggtggattgcttgagcccagaagttgaagaccagcctgagaaataaggtgaaaccctgtctacaaaaaatacaaaaagttagctgggtgtggtggcgtgtgcctgtagtgctagctactcagaaggctgaggtgggaggattgtttgagcccaggaggttgaggctgcagtgagttctaattgcgccactgcactccagcctgagcgacagagtgagacactgtcttaaaaaaaattaaaaattgt

SEQ ID NO: 644 - protein, 223 aa, Homo sapiens
MIINWNQVSVLWKCLLKQSASYQDRRQSWRRASMKETNRRKSLHPIHQGITELSRSISVDLAESKRLGCLLLSSFQFSIQKLEPFLRDTKGFSLESFRAKASSLSEELKHFADGLETDGTLQKCFEDSNGKASDFSLEASVAEMKEYITKFSLERQTWDQLLLHYQQEAKEILSRGSTEAKITEVKVEPMTYLGSSQNEVLNTKPDYQKNYRTRAKSLTVWSW

SEQ ID NO: 645 - DNA, 2833 bp, Homo sapiens
atcctcaccaccaccggcctcttcttcgtctttgactgtccctacctggctcgcaagctgacccttgccatccccatcatcgctgccatcctcttcttcttcgtcatgagctgcctgctgcagacaagcttcaccgaccctgggatcctgccccgggccactgtctgtgaagcagccgccctggagaaacagatcgacaacacaggcagttctacataccggccaccccctcggacccgggaggtgctgatcaacgggcagatggtgaagctgaagtactgcttcacctgcaagatgttccggccaccccgaacctcacactgcagtgtctgcgacaactgtgtggaacgatttgaccatcactgcccctgggtgggcaactgtgtggggagacggaactatcgcttcttctacgcgtttattctctccctctcattcctgacggccttcatcttcgcctgtgtggtcacccacctgacgttgcgcgctcagggaagcaacttcctctccactctgaaggagacaccagcaagcgtgctggagttggtgatctgcttcttctccatctggtccattctgggcctctcagggtttcacacgtacctcgtcgcctccaacctgactactaatgaagacatcaaaggctcgtggtccagcaagaggggcggtgaggcctctgtcaacccctacagccataaaagtattatcaccaactgctgtgctgtgctctgtggccccctacctcccagcctaattgaccggaggggatttgtgcagtccgacaccgtgttgccctcacccatcagaagcgatgagccagcctgcagagccaagcctgatgccagcatggtaggaggccacccctgaccacggctcagtacttgccacctgctggcctgtctgaccctccgcactcacctgccgggaccctccctattccatccaagggaagcagaactgccaaagactcaagtcttttcatatttatttcccatcctgcgtggctttccctgaactgttccgtggctgtgccctctgctccccaaacccaggttcccacagccttgggccctaggtaccccagctgatcagtgccaggagagaccagagcctctggaggctacccaggggaccacaccaagtccttgcctgtgccgggcgagccctgtgtgagtgaggctgtgaactgagcgtgaggcctcccaggtgggggaactgcttgggccttgctgagccagggtcctcagggtgaagcaggactgaggagtggccagctctggatagctggctgtggagaggaagcctccatgggctgctttggtctgtgggctccttcattcccttggtgataatttccctttattctgtgggatttttggtggggttttccccccttttttatggagttggccaataggattgagttggggctccagtagagaaggcagggttggtggtgggtgggggcagcctgtatcagacaaaggtaaatcagccagccaggcacccacagcctcagctcctgtgcagttcctgggcagcacagtggaagtgggagcctggtccttcccctgcccatggagagctctttaagggatcccagcctgcccctccacttctctcccaagccaggtcccggcatgggtgggttatgctcatgctggcaatacttgaaacgggtttattaatgctgggtattttgcacaattttatagacctcttttctacatagtcttttttaaatggaaggagaaaatgtcagccacattactgtctgtgtagtgccaggtgaagggttatcagaaggctggttggttttaataagtttattccaagagaccttctggctggaatgagtgagagtgtgtgtgcatgtgtgtgtgtgttcatgtgtgccctgtatgaatgtggctggctcccatatcccctgggctgccccctgccccatcccctttgagtgtcagaagcactctgagccaaggggacagggggcacgtgcactggtcacgagaaaaccctgggctcccactggggctcagcccagcctcctatctttccttcttctatggacttcagacagccagtgtctggggactctgccactctacccccagccctacccaccagcccccaggtgaggcttccagctgggacctgcccagacaggctgagcctgggcgtggtgggtggggtgatggctctggggagcggctgccatcctacaagccacaccccctcctctgagctctgaatatgggacccagtgccaggagctggaagacaaggtgtttctgccaaacggggacctccatccagagaaaaggaagaaggtgcagggtgggccaagaggcaagtgaaggttggcctgagtctgggccggaaactcagaggatgtttctcctctgctgggagctgtagtttcttatcaaaatagatattgttccaccatccccctccttggcccttcaagtgggctgaagcccttggaaagtgacataggaagtccccagatcttgcccttctcactccagaggctagtggtcacagacagctgggaatggcagccacagagggtcccctctgggagaaacagcttcaccccagcctcagggccctgggccatcactgcagtggccctgggaggtgaggaagaagctggctagaggagggggctcccacctaccttttatttaagccagtattctttgttcctgcttgtaataaaacttcagtttataagagttaaaaaaaaaaaaaaaaaaaaaaaaaaaaaaaaaaaaaaaaaaaaaaaaaaaaaaaaaaaaaaaaaaaaaaaaaaaaaaaaaaaaaaaaa

SEQ ID NO: 646 - protein, 288 aa, Homo sapiens
ILTTTGLFFVFDCPYLARKLTLAIPIIAAILFFFVMSCLLQTSFTDPGILPRATVCEAAALEKQIDNTGSSTYRPPPRTREVLINGQMVKLKYCFTCKMFRPPRTSHCSVCDNCVERFDHHCPWVGNCVGRRNYRFFYAFILSLSFLTAFIFACVVTHLTLRAQGSNFLSTLKETPASVLELVICFFSIWSILGLSGFHTYLVASNLTTNEDIKGSWSSKRGGEASVNPYSHKSIITNCCAVLCGPLPPSLIDRRGFVQSDTVLPSPIRSDEPACRAKPDASMVGGHP

SEQ ID NO: 647 - DNA, 3048 bp, Homo sapiens
gagtcctccccgcctcgcagagttgggagaaggcagggtggggggtgtggaaaaataaaaggaaaagtccttgcaccatgtagatcagcgtcccccactttggcatcccggccggccggggacctcccagtctgcggccatgaacgcgagcagcgagggcgagagcttcgcgggctcggtgcaaattccaggtggcacaacggtgctggtggagctgactcccgacatccatatctgcggcatctgcaagcagcagtttaacaacctggatgcctttgtagctcacaagcaaagtggctgccagctgacaggcacatccgcagcagcccccagcacggtccagtttgtatcggaggaaacagtgcctgccacccagactcagaccaccaccagaaccatcacctcggagacccagacaatcacagtttcagctccagaatttgtttttgaacatggctatcaaacttacctgcccacggaaagtaatgaaaaccagacagccactgtcatctctctccctgccaagtcacgcaccaaaaagcccacaacaccacctgctcagaaaaggcttaactgttgctatccaggttgccaattcaagactgcttatggcatgaaggacatggagcggcatttaaaaattcacacgggagacaaaccccataagtgtgaagtctgtggcaagtgctttagccggaaagacaagctgaaaactcacatgcggtgccacacgggcgtgaagccctacaagtgtaagacgtgtgactacgccgctgccgacagcagcagcctcaacaagcacctgaggatccactcggacgagcggcccttcaaatgccagatctgcccctacgccagccgcaactccagccagctcactgtccacctgcgatcccacacgggggacgcccccttccagtgctggctctgtagcgccaagttcaaaatcagctcggacttgaaaaggcacatgcgggtgcactcgggggagaagcctttcaagtgcgagttctgcaatgtccgctgcaccatgaaggggaacctcaagtcgcacatccgtatcaagcacagcgggaataacttcaagtgtcctcattgcgacttcctgggtgacagcaaagccaccctccggaagcacagccgcgtgcaccagtcggagcatcctgagaagtgctcggaatgcagctactcctgctccagcaaggccgccctgcgcatccacgagcgtatccactgcaccgaccgccctttcaagtgcaactactgcagcttcgacaccaaacagcccagcaacctgagcaagcacatgaagaagttccacggggacatggttaagactgaggctctagagaggaaggacaccggcaggcagagcagccggcaggtggccaagctggatgccaagaagagtttccactgcgatatatgcgatgcctccttcatgcgggaggactcgctccgcagccacaagagacagcacagtgagtacaatgagagtaagaactcggacgtgaccgttctccagtttcagatcgaccccagcaagcagcccgccacgcccctcactgtgggacacctccaggtgcccctccagcccagccaagtgccccagttcagcgagggaagagtcaaaatcatcgttgggcatcaggtgccccaggcgaacaccatcgtccaggctgccgctgctgcagtgaacatcgtcccgcctgccttggtggcccagaacccagaggaactcccagggaacagccggctgcagatcctgcgccaggtcagtctgatcgccccccctcagtcctcgcggtgtccgagcgaggcgggcgcaatgacccagccggctgtcctgctgaccacccacgagcagacggacggagccactctgcaccagactctcatccccacggcctcaggtggcccccaggaaggctctggcaatcaaactttcattaccagttcgggtattacttgcactgactttgaaggcctaaacgccttgattcaggaggggacagcagaagtgacagtggtgagcgatggaggccagaacatcgcagtggccaccacagcgccaccggtcttctcctcctcttcccagcaagaactacccaagcagacctactccatcattcaaggggcagcccatccagctttgctctgtcccgccgactccattccagattagtgcttaaaaaacaaaaggagtgggggaaaggaattgagaaaaagaaatcttaagtagaattctctaaaaggtttgctcttaatgttttctttgttttgttttgtttttgagacggagtctcgctctgtttcccaggctggagtgcagtggcgctatcttggctcactgcaacgtccgcctcccaggttcaagcgattctcatgcctcggccctccgagtagctgggaccacaggtgtacgacatcatgactggctaatttttgtatatttaatagaggcggggtttcatcatgttgaactcctgacctcaagtgatctgcccacctcagcctcccaaagtgctgggattacaggtgtgagccaccatgcctggccgtggtttgctcttaatgtttttaaggatggttgtgaatccccctggccccataataaattgtaattttatactgcttactataatttttttaacactgtaacaactttgagaccacctctgaatcgtcgcattataactgttgtagaatcttaaatgttaccaagatgattccaatgaggggttggaattaaatgcattaagtagtgaactcatgtgtttgtttccaacttgattttccaactctaataaaggtttctgtccatcttattacatttgtgtagtaaatggtacttcccagcctctcttttgccccattctggaatactccccagagtttgggggtgttcatgttttatacatgtaagtctgttggcatgaaggaccattttctacataatatgacatggatacttgacccaaaaaaaatgtttagtgctaatgagcagaaaatgaatggttccataataaattgatatctgattaaaat

SEQ ID NO: 648 - protein, 681 aa, Homo sapiens
MNASSEGESFAGSVQIPGGTTVLVELTPDIHICGICKQQFNNLDAFVAHKQSGCQLTGTSAAAPSTVQFVSEETVPATQTQTTTRTITSETQTITVSAPEFVFEHGYQTYLPTESNENQTATVISLPAKSRTKKPTTPPAQKRLNCCYPGCQFKTAYGMKDMERHLKIHTGDKPHKCEVCGKCFSRKDKLKTHMRCHTGVKPYKCKTCDYAAADSSSLNKHLRIHSDERPFKCQICPYASRNSSQLTVHLRSHTGDAPFQCWLCSAKFKISSDLKRHMRVHSGEKPFKCEFCNVRCTMKGNLKSHIRIKHSGNNFKCPHCDFLGDSKATLRKHSRVHQSEHPEKCSECSYSCSSKAALRIHERIHCTDRPFKCNYCSFDTKQPSNLSKHMKKFHGDMVKTEALERKDTGRQSSRQVAKLDAKKSFHCDICDASFMREDSLRSHKRQHSEYNESKNSDVTVLQFQIDPSKQPATPLTVGHLQVPLQPSQVPQFSEGRVKIIVGHQVPQANTIVQAAAAAVNIVPPALVAQNPEELPGNSRLQILRQVSLIAPPQSSRCPSEAGAMTQPAVLLTTHEQTDGATLHQTLIPTASGGPQEGSGNQTFITSSGITCTDFEGLNALIQEGTAEVTVVSDGGQNIAVATTAPPVFSSSSQQELPKQTYSIIQGAAHPALLCPADSIPD

SEQ ID NO: 649 - DNA, 1822 bp, Homo sapiens
gcggccgctggcgtcggtgctcagcggtgttggaacttcgttgcttgcttgcctgtgcgcgcgtgcgcggacatggcctcaaacgattatacccaacaagcaacccaaagctatggggcctaccccacccagcccgggcagggctattcccagcagagcagtcagccctacggacagcagagttacagtggttatagccagtccacggacacttcaggctatggccagagcagctattcttcttatggccagagccagaacagctatggaactcagtcaactccccagggatatggctcgactggcggctatggcagtagccagagctcccaatcgtcttacgggcagcagtcctcctatcctggctatggccagcagccagctcccagcagcacctcgggaagttacggtagcagttctcagagcagcagctatgggcagccccagagtgggagctacagccagcagcctagctatggtggacagcagcaaagctatggacagcagcaaagctataatccccctcagggctatggacagcagaaccagtacaacagcagcagtggtggtggaggtggaggtggaggtggaggtaactatggccaagatcaatcctccatgagtagtggtggtggcagtggtggcggttatggcaatcaagaccagagtggtggaggtggcagcggtggctatggacagcaggaccgtggaggccgcggcaggggtggcagtggtggcggcggcggcggcggcggtggtggttacaaccgcagcagtggtggctatgaacccagaggtcgtggaggtggccgtggaggcagaggtggcatgggcggaagtgaccgtggtggcttcaataaatttggtggccctcgggaccaaggatcacgtcatgactccgaacaggataattcagacaacaacaccatctttgtgcaaggcctgggtgagaatgttacaattgagtctgtggctgattacttcaagcagattggtattattaagacaaacaagaaaacgggacagcccatgattaatttgtacacagacagggaaactggcaagctgaagggagaggcaacggtctcttttgatgacccaccttcagctaaagcagctattgactggtttgatggtaaagaattctccggaaatcctatcaaggtctcatttgctactcgccgggcagactttaatcggggtggtggcaatggtcgtggaggccgagggcgaggaggacccatgggccgtggaggctatggaggtggtggcagtggtggtggtggccgaggaggatttcccagtggaggtggtggcggtggaggacagcagcgagctggtgactggaagtgtcctaatcccacctgtgagaatatgaacttctcttggaggaatgaatgcaaccagtgtaaggcccctaaaccagatggcccaggagggggaccaggtggctctcacatggggggtaactacggggatgatcgtcgtggtggcagaggaggctatgatcgaggcggctaccggggccgcggcggggaccgtggaggcttccgagggggccggggtggtggggacagaggtggctttggccctggcaagatggattccaggggtgagcacagacaggatcgcagggagaggccgtattaattagcctggctccccaggttctggaacagctttttgtcctgtacccagtgttaccctcgttattttgtaaccttccaattcctgatcacccaagggtttttttgtgtcggactatgtaattgtaactatacctctggttcccattaaaagtgaccattttagttaaaaaaaa

SEQ ID NO: 650 - protein, 525 aa, Homo sapiens
MASNDYTQQATQSYGAYPTQPGQGYSQQSSQPYGQQSYSGYSQSTDTSGYGQSSYSSYGQSQNSYGTQSTPQGYGSTGGYGSSQSSQSSYGQQSSYPGYGQQPAPSSTSGSYGSSSQSSSYGQPQSGSYSQQPSYGGQQQSYGQQQSYNPPQGYGQQNQYNSSSGGGGGGGGGGNYGQDQSSMSSGGGSGGGYGNQDQSGGGGSGGYGQQDRGGRGRGGSGGGGGGGGGGYNRSSGGYEPRGRGGGRGGRGGMGGSDRGGFNKFGGPRDQGSRHDSEQDNSDNNTIFVQGLGENVTIESVADYFKQIGIIKTNKKTGQPMINLYTDRETGKLKGEATVSFDDPPSAKAAIDWFDGKEFSGNPIKVSFATRRADFNRGGGNGRGGRGRGGPMGRGGYGGGGSGGGGRGGFPSGGGGGGGQQRAGDWKCPNPTCENMNFSWRNECNQCKAPKPDGPGGGPGGSHMGGNYGDDRRGGRGGYDRGGYRGRGGDRGGFRGGRGGGDRGGFGPGKMDSRGEHRQDRRERPY

SEQ ID NO: 651 - DNA, 2593 bp, Homo sapiens
gaaagtgctggcggaaccggagaaggtggtgaccgagcctccagttgtcaccctgttggacaagaaggagggtgagcaagccaaagccctgtttgagaaggtgaagaagttccgcatgcacgtggaagagggcgacatcctgtacaccatgtacatccgacagacggtgctgaaagtgtgtaagttcctggccatcctggtctacaacctggtctatgtggagaagatcagtttcctggtggcctgtagggtggagacgtcagaggtcacgggctacgccagcttctgctgcaaccacaccaaggcccacctcttctccaagctggccttctgttacatctcctttgtgtgcatctacggacttacctgcatctacacgctctactggctcttccaccggcccctcaaggagtactccttccgttccgtgcgggaggagactggcatgggggacattcctgacgtcaagaatgacttcgccttcatgctgcacctcatcgatcagtacgactccctctactccaagcgcttcgccgtcttcctgtccgaggtcagcgaaagccgtctaaagcagctcaatctcaaccacgagtggacgcccgagaagcttcgacagaagctgcagcgcaatgccgcgggccggctggagctggccctctgcatgctgccgggtctgcccgacaccgtctttgagctcagtgaggtggagtcactcaggctggaggccatctgcgatatcaccttccccccggggctgtcacagctggtgcacttgcaggagctcagcttgctccactcgcccgccaggctacccttctccttgcaggtcttcctgcgggaccacctgaaggtgatgcgcgtcaaatgcgaggagctccgcgaggtgccgctttgggtgtttgggctgcggggcttggaggagctgcacctggaggggcttttcccccaggagctagctcgggcagccaccctggagagcctccgggagctgaagcagctcaaggtgttgtccctccggagcaacgccgggaaggtgccagccagtgtgaccgacgttgctggccacctgcagaggctcagcctgcacaacgatggggcccgtctggttgccctgaacagcctcaagaagctggcggcattgcgggagctggagctggtggcctgcgggctggagcgcatcccccatgcagtgttcagcctgggtgcgctgcaggaacttgacctcaaggacaaccacctgcgctccatcgaggaaatcctcagcttccagcactgccggaagctggtcacgctcaggctgtggcacaaccagatcgcctacgtccctgagcacgtgcggaagctcaggagcctggagcagctctacctcagctacaacaagctggagaccctgccctcccagctcggcctgtgctcaggcctccgtctgctggatgtgtcccacaatgggctacactccctgccacccgaggtgggcctcctgcagaacctacagcacctggccctctcctacaatgccctggaggccctgcccgaagagctcttcttctgccgcaagctgcggacgttgcttctgggcgacaaccagctgagccagctctcgccccacgtgggtgccctcagagccctcagccgcctggagctcaaaggcaaccgcttagaggcgctgccagaagaacttggcaactgtggggggctcaagaaggcggggctcctggtggaagacacgctttaccagggtctgccggcagaagtgcgggacaagatggaggaggaatgaagctggggtggggccgttttaggtagagccttaaaaatgcttctgccctggaatctcaaccattgtcttccaagataggaagccaagtgggtccaggccaggagatgggggcgggggcagctgtgtcatctttctggggcccaggaggatctgggctggtttgtctggggagacagacaggatgttgtggagctggggtggaacctggtatggagggattaactcagtcatggcattctccgaccaaaaccacacctgtgtctctggcaggctggctggccttgctcccatccctagaactgctgcctctccctggatattccagctcaattagtgccacatatgggggaaacgacacatcccagtgggatttccaacactccccctccccatgcaacaaagcaacttacttctggagttctctcccaaggagaggacacagacacagttgtttgctgtgttatatgttagctccgaacaatggttctcatttggctaagcatcaaaatcacctagggagtcggtgcaaaacaaaatatcccagtcccctcccctgaaacactgactcaggaggtttggttgggggccaggagtctgttcctaaatattccaggtagttctggtgcaggtaagtggccctgagacagtatgttgggaaatgctgacgtaaaggtatcagggccgggcgctgtggctcatgactataatcccagctgtttgagaggccaatgcaggaggatggttgagctcaggagttcgagatcagcctgggtaacatagcgagaccccacctctgccaaaaaaaaaaaaaaa

SEQ ID NO: 652 - protein, 444 aa, Homo sapiens
MGDIPDVKNDFAFMLHLIDQYDSLYSKRFAVFLSEVSESRLKQLNLNHEWTPEKLRQKLQRNAAGRLELALCMLPGLPDTVFELSEVESLRLEAICDITFPPGLSQLVHLQELSLLHSPARLPFSLQVFLRDHLKVMRVKCEELREVPLWVFGLRGLEELHLEGLFPQELARAATLESLRELKQLKVLSLRSNAGKVPASVTDVAGHLQRLSLHNDGARLVALNSLKKLAALRELELVACGLERIPHAVFSLGALQELDLKDNHLRSIEEILSFQHCRKLVTLRLWHNQIAYVPEHVRKLRSLEQLYLSYNKLETLPSQLGLCSGLRLLDVSHNGLHSLPPEVGLLQNLQHLALSYNALEALPEELFFCRKLRTLLLGDNQLSQLSPHVGALRALSRLELKGNRLEALPEELGNCGGLKKAGLLVEDTLYQGLPAEVRDKMEEE

SEQ ID NO: 653 - DNA, 2768 bp, Homo sapiens
ggcacgaggctttctcgggcgcaggaggttccgcaggcccaggccaggccaggggaggcagccgatccgtcgtcggggttgacagttaccatggcgccgcctctggccccgctccctccccgggacccaaacggggccggacccgagtggagggagccgggggctgtgagcttcgcggacgtggccgtgtacttctgccgggaggagtggggctgcttgcggccagcgcagagggccctgtaccgggacgtgatgcgggagacctacggccacctgagcgctctcggaatcggaggcaacaagccagctctcatctcctgggtggaggaggaggccgaactgtggggtccggctgcccaggatccggaggtggcgaaatgtcagacacaaacggacccagcagattccagaaacaagaaaaaggaaagacaaagggaagggacgggagccctggagaagcccgaccctgtggccgccgggtctcctgggctgaagtctccccaagccccctcggccgggcccccttatggttgggagcagctgtccaaggcaccgcaccggggacgcccctccctctgtgcccacccccctgtcccccgagctgaccagcgtcatggctgctacgtgtgcgggaagagctttgcctggcgctccacactggtggagcacgtctacagtcacactggcgagaagcccttccactgcactgactgcggcaagggcttcggccacgcttcctccctgagcaaacaccgggccatccatcgtggggagcggccccaccgctgtctggagtgtggccgggccttcacgcagcgctcggcgctgacttcgcacctgcgcgtccacaccggcgagaaaccctatggctgcgccgactgtggccgccgcttcagccagagctctgccctctaccagcaccggcgcgtgcacagcggcgagacccccttcccctgcccggactgtggccgcgccttcgcctacccctcggacctgcggcgccacgtgcgcacccacaccggcgagaagccctacccgtgcccggactgcgggcgctgcttccgccagagctcggagatggcagtccacaggcgcacccacagcggcgagaagccctacccctgcccgcagtgcggccgccgctttggccagaagtcagccgtggccaaacaccagtgggttcatcggcccggggccgggggccacaggggccgggtcgccgggcgtctgtctgtgaccctgacccctggccacggagacctggacccgcccgtgggcttccagctgtacccggagatattccaggagtgtgggtgacggccttaaaagtgactatctagacattacgggaggcccgagatgggctcaggggcccgaacctctgcggcggcctgcagggaggtcccagaatctagggcaagagctggccctggggtgcggacagtctgatcttgggcccttagcagcctcctctgccagcaccttgctccccactgcccagggctctccaaggccccctctactgaggcagggctgagttgagaacccccagacctacataaggggaaccaaaagctgtttctcagcccagaggtgctaagaggactgaggtagaggagaaccttgttttacccattgtctttttaaattttttatcattatttttattcttgtgaccctcccagaacacaatactcattgtctttttatttatttatttatttatttctgagacagcttcctgctctgtcacccaggctggagtgcagtggtgtgaacagggctaactgcagcctcaacctgcagtgctcaaggaatcctctcccatcagccttccaaatatctgagactacaggcgggcaacactacggccagctaatttttaaattttacatagagatgaggttctcactgttgtccaggctggtctcaaactccttggctgaagtgatcctgtcgtctcggcttccgcaagtgctgggattacaggcgtgagctaccaccatgcctggcttccattgtctttgtgtgtgtgtgtgtgtgatggggttttgctcttgttgcccaggctggagtgcaatagcgcaatctcagctcactgcaacctctgcctccagagttcaagcaattctccttcctcagcctcccaagtagctgggactacaggcacccaccacctccattgtctttttactgcccaagttaaaatcctgtgactgtgtactggatctggcctgcggttgtcatatttattgatctgagtccaggcagtgtttttaagtgatatgagttagtagtgaaaattgaaaaggatattttacaaccaaatacaggttttctggtgtcttttgaaaaatccaaagatttggcaactcgacctaggctccgacaaaaccacagttgttgggagctgagccggagccagaactcacaattcaccgtggcccggccacccatccccaccactcccgtgggctcctgaccaagcaccacgtgccattcatcatggcttgcttttagtgtttttggtgtttatcttaaagtacagcgaagaagaaagggaagtatttcttagacccatgtctctgtccaaataggcctttccatctggcatttcccgctcatttatatgacttgctgagttcctatggtcatttgagtttgcaaacagtggtctgtagcactcaggttttctggagttggagagaaagggtggcaagagagaagtaaaagttggttttattttaaaaaaaaaaaaaaaaaaaaaa

SEQ ID NO: 654 - protein, 408 aa, Homo sapiens
MAPPLAPLPPRDPNGAGPEWREPGAVSFADVAVYFCREEWGCLRPAQRALYRDVMRETYGHLSALGIGGNKPALISWVEEEAELWGPAAQDPEVAKCQTQTDPADSRNKKKERQREGTGALEKPDPVAAGSPGLKSPQAPSAGPPYGWEQLSKAPHRGRPSLCAHPPVPRADQRHGCYVCGKSFAWRSTLVEHVYSHTGEKPFHCTDCGKGFGHASSLSKHRAIHRGERPHRCLECGRAFTQRSALTSHLRVHTGEKPYGCADCGRRFSQSSALYQHRRVHSGETPFPCPDCGRAFAYPSDLRRHVRTHTGEKPYPCPDCGRCFRQSSEMAVHRRTHSGEKPYPCPQCGRRFGQKSAVAKHQWVHRPGAGGHRGRVAGRLSVTLTPGHGDLDPPVGFQLYPEIFQECG

SEQ ID NO: 655 - DNA, 2821 bp, Homo sapiens
cagaacagggaaatgtggtgtttaccagtgcaatagatgggtggggctttggaattgagcacttcgccagaatctacagtcaaaaaattggcatcaaaaaggaagttcttatgaaaaccttgtggggagattactatataaatatgaaggctaaaaagatcatgaagggtgatcaggccaaaggaaagaaacctttatttgtacagttgatcctggaaaatatatggagtttgtatgatgctgttttgaaaaaggacaaagacaaaattgataaaatagtgacttctttaggattaaaaattggagcccgggaggcacgacattcagaccctaaagttcagatcaacgccatttgcagtcagtggctacccatatcccatgctgttcttgctatggtgtgtcagaaacttcctagtccccttgatattacagctgagagagtggagagactgatgtgcacaggatcacaaacttttgactcttttccaccagaaactcaagcactgaaagcagcttttatgaaatgtggaagtgaggacactgctccagttattatatttgtttccaaaatgtttgcagttgatgctaaggccttgcctcagaataagccaaggcctctcactcaagaagaaattgctcagagacgtgagcgtgcaagacaaaggcatgcagagaagcttgcagcagcacagggacaggcacccttggagcccacccaagatgggagtgccattgaaacatgtccaaaaggagacgagccaagaggtgacgagcaacaggtggaaagtatgacccctaaacctgtgctccaggaagaaaacaaccaagagtcttttattgcatttgctcgggtgttcagtggtgtggctcgaagaggaaagaaaatttttgtcttggggcccaaatacagtcctcttgagtttttacgaagggtaccattaggcttctcagctccaccagatggcctcccccaagtcccccacatggcatactgtgctctggaaaacctgtatcttctgatgggaagggaactggaatatctagaggaggtacctccaggaaatgtgctaggaataggaggccttcaagattttgtgctgaaatctgcaacactgtgtagcctgccatcctgcccaccatttataccactcaacttcgaagccactcctattgtgagagttgctgttgaaccaaaacatccaagtgaaatgcctcggctcgtaaaaggaatgaaactgttaaaccaggctgatccctgtgtccagattttaattcaggaaacgggagagcacgttttagtcacagcaggagaagtccaccttcagcgatgcctggatgacttaaaagaaaggtttgcaaagattcatatcagtgtatctgaacctattattccattcagagaaacaatcacaaaacccccaaaagttgacatggtcaatgaagaaataggcaaacagcaaaaagttgcagtcatacaccaaatgaaagaagatcaaagcaaaatccctgaaggaatccaagttgactctgacgggctaatcaccataacaactcccaataaacttgccacgctcagtgttcgagccatgccccttccagaagaagtcacccagattctggaagaaaatagtgatttgattcgttctatggagcagttgacatcctctttgaatgagggcgaaaatactcacatgattcatcagaagacccaagagaaaatttgggaattcaaaggaaaactggagcaacacctaacagggagaagatggaggaacattgttgaccaaatctggtcatttggcccaagaaaatgtgggcccaacatactagtcaataaaagtgaagattttcagaactcagtatggacaggtccagctgacaaagcttcaaaagaagccagtagataccgagatttgggcaatagcattgtgagtggcttccaactagcaaccctctctggccccatgtgtgaggagcctctcatgggtgtctgttttgttctggaaaaatgggacctaagtaaatttgaggaacaaggagcaagtgatctggcaaaagagggacaggaggaaaatgaaacctgttctggtggaaatgaaaaccaagagctacaagatggctgctctgaggcctttgagaagaggacatcacagaaaggagaatctccactcactgactgctatggacctttctcaggacagctaattgccaccatgaaagaagcatgtcgctatgcactgcaagtgaaacctcagcgcctgatggcagctatgtacacatgtgacatcatggccactggtgatgttctcggtcgagtctatgctgtcttgtcaaagagagaaggtcgggtacttcaagaagaaatgaaagaagggacagacatgttcatcatcaaggctgtgctgcctgttgctgaaagctttggttttgctgatgaaatcaggaagaggacaagtggcctggccagcccacaactagtattcagccattgggagatcattcccagtgaccccttctgggtgccaactactgaggaggaatacttgcactttggggagaaggctgactctgagaaccaagcccggaagtacatgaacgcagtacgaaagcggaaggggctttatgtggaagaaaagattgtggagcatgcagaaaagcagaggacactcagcaaaaataagtagctacctactactggtggattcttttccttatagtgaatttaaaagtatcatcaagggtttaatattgggaaaatttctttttgccacattatctctgtttattcactttcaataaagttgatccatataaatatttt

SEQ ID NO: 656 - protein, 857 aa, Homo sapiens
MKTLWGDYYINMKAKKIMKGDQAKGKKPLFVQLILENIWSLYDAVLKKDKDKIDKIVTSLGLKIGAREARHSDPKVQINAICSQWLPISHAVLAMVCQKLPSPLDITAERVERLMCTGSQTFDSFPPETQALKAAFMKCGSEDTAPVIIFVSKMFAVDAKALPQNKPRPLTQEEIAQRRERARQRHAEKLAAAQGQAPLEPTQDGSAIETCPKGDEPRGDEQQVESMTPKPVLQEENNQESFIAFARVFSGVARRGKKIFVLGPKYSPLEFLRRVPLGFSAPPDGLPQVPHMAYCALENLYLLMGRELEYLEEVPPGNVLGIGGLQDFVLKSATLCSLPSCPPFIPLNFEATPIVRVAVEPKHPSEMPRLVKGMKLLNQADPCVQILIQETGEHVLVTAGEVHLQRCLDDLKERFAKIHISVSEPIIPFRETITKPPKVDMVNEEIGKQQKVAVIHQMKEDQSKIPEGIQVDSDGLITITTPNKLATLSVRAMPLPEEVTQILEENSDLIRSMEQLTSSLNEGENTHMIHQKTQEKIWEFKGKLEQHLTGRRWRNIVDQIWSFGPRKCGPNILVNKSEDFQNSVWTGPADKASKEASRYRDLGNSIVSGFQLATLSGPMCEEPLMGVCFVLEKWDLSKFEEQGASDLAKEGQEENETCSGGNENQELQDGCSEAFEKRTSQKGESPLTDCYGPFSGQLIATMKEACRYALQVKPQRLMAAMYTCDIMATGDVLGRVYAVLSKREGRVLQEEMKEGTDMFIIKAVLPVAESFGFADEIRKRTSGLASPQLVFSHWEIIPSDPFWVPTTEEEYLHFGEKADSENQARKYMNAVRKRKGLYVEEKIVEHAEKQRTLSKNK

SEQ ID NO: 657 - DNA, 2155 bp, Homo sapiens
tgggggcgttcgcctcgtttgcctcgcgccctccactggagctgttcgcgcctcccggctcccaccgcagcccacccggcagaggagtcgctaccagcgcccagtgcgctctgtcagtccgcaaactccttgccgcccgccccgggctgggcgccaaataccaggctaccatggtctacaagactctcttcgctctttgcatcttaactgcaggatggagggtacagagtctgcctacatcagctcctttgtctgtttctcttccgacaaacattgtaccaccgactaccatctggactagctctccacaaaacactgatgcagacactgcctccccatccaacggcactcacaacaactcggtgctcccagttacagcatcagccccaacatctctgcttcctaagaacatttccatagagtccagagaagaggagatcaccagcccaggttcgaattgggaaggcacaaacacagacccctcaccttctgggttctcgtcaacaagcggtggagtccacttaacaaccacgttggaggaacacagcttgggcactcctgaagcaggcgtggcagctacactgtcgcagtccgctgctgagcctcccacactcatctcccctcaagctccagcctcatcaccctcatccctatcaacctcaccacctgaggtcttttctgcctccgttactaccaaccatagctccactgtgaccagcacccaacccactggagctccaactgcaccagagtccccaacagaggagtccagctctgaccacacacccacttcacatgccacagctgagccagtgccccaggagaaaacacccccaacaactgtgtcaggcaaagtgatgtgtgagctcatagacatggagacaccaccacctttcccagggtgatcatgcaggaagtagaacatgcattaagttcaggcagcatcgccgccattaccgtgacagtcattgccgtggtgctgctggtgtttggagttgcagcctacctaaaaatcaggcattcctcctatggaagacttttggacgaccatgactacgggtcctggggaaactacaacaaccctctgtacgatgactcctaacaatggaatatggcctgggatgaggattaactgttctttatttataagtgcttatccagtagaattaataagtacctgatgcgcattgaacgacaatcttaagccctgttttgttggtatggttgtttttgttttcctccctctcctctggctgctacaacttcccctttctggtacaagaagaaccattctttaaaggtgagtggaggctgatttgcagctgaagtgggccagccttgcaccagccaggccagaccaccatggtgaaggcttctttccccactgcaggacccactttgagaaggaccgaggaggaggatttgggttgttttgttaggggttactttcaggggaacatttcatttgtgttatttcttaaacttctatttaggaaattacattaagtattaatgaggggaaaggaaatgagctctacgaggatttcaccctgcatgggagagagcagggttttctcagattcctttttaatctctatttatctggttgtttctgacaggatgctgcctgcttggctctacaagctggaaagcagcttcttagctgcctaattaatgaaagatgaaaataggaagtgccctggagggggccagcaggtcacggggcagaatctctcaggttgctgtgggatctcagtgtgcccctacctgttctcccctccaggccacctgtctctgtaaaggatgtctgctctgttcaaaaggcagctgggatcccagcccacaagtgatcagcagagttgcatttccaaagaaaaaggctatgagatgagctgagttatagagagaaagggagaggcatgtacggtgtggggaagtggaagggaagctggcgggggagaaggaggctaacctgcactgagtacttcattaggacaagtgagaatcagctattgataatggccagagatatccacagcttggaggagcccagagaccgtttgctttatacccacacagcaactggtccactgctttactgtctgttggataatggctgtaaaatgtttaaaaacaaaaaaaaaaaaaaaaaaaa

SEQ ID NO: 658 - protein, 244 aa, Homo sapiens
MVYKTLFALCILTAGWRVQSLPTSAPLSVSLPTNIVPPTTIWTSSPQNTDADTASPSNGTHNNSVLPVTASAPTSLLPKNISIESREEEITSPGSNWEGTNTDPSPSGFSSTSGGVHLTTTLEEHSLGTPEAGVAATLSQSAAEPPTLISPQAPASSPSSLSTSPPEVFSASVTTNHSSTVTSTQPTGAPTAPESPTEESSSDHTPTSHATAEPVPQEKTPPTTVSGKVMCELIDMETPPPFPG

SEQ ID NO: 659 - DNA, 1919 bp, Homo sapiens
gtcctgccgagctgtgagggcaacggaggggaaataaaagggaacggctccgaatctgccccagcggccgctgcgagacctcggcgccgacatcgcgacagcgaagcgctttgcacgccaggaaggtcccctctatgtgctgctgagccggtcctggacgcgacgagcccgccctcggtcttcggagcagaaatcgcaaaaacggaaggactggaaatggcagaccatatgatggccatgaaccacgggcgcttccccgacggcaccaatgggctgcaccatcaccctgcccaccgcatgggcatggggcagttcccgagcccccatcaccaccagcagcagcagccccagcacgccttcaacgccctaatgggcgagcacatacactacggcgcgggcaacatgaatgccacgagcggcatcaggcatgcgatggggccggggactgtgaacggagggcaccccccgagcgcgctggcccccgcggccaggtttaacaactcccagttcatgggtcccccggtggccagccagggaggctccctgccggccagcatgcagctgcagaagctcaacaaccagtatttcaaccatcacccctacccccacaaccactacatgccggatttgcaccctgctgcaggccaccagatgaacgggacaaaccagcacttccgagattgcaaccccaagcacagcggcggcagcagcacccccggcggctcgggcggcagcagcacccccggcggctctggcagcagctcgggcggcggcgcgggcagcagcaacagcggcggcggcagcggcagcggcaacatgcccgcctccgtggcccacgtccccgctgcaatgctgccgcccaatgtcatagacactgatttcatcgacgaggaagttcttatgtccttggtgatagaaatgggtttggaccgcatcaaggagctgcccgaactctggctggggcaaaacgagtttgattttatgacggacttcgtgtgcaaacagcagcccagcagagtgagctgttgactcgatcgaaaccccggcgaaagaaatcaaacccccaacttcttcggcgtgaattaaaagaaacattcccttagacacagtatctcacttttcagatcttgaaaggtttgagaacttggaaacaaagtaaactataaacttgtacaaattggttttaaaaaaaattgctgccacttttttttcctgtttttgtttcgtttttgtagccttgacattcacccacctcccttatgtagttgaaatatctagctaacttggtctttttcgttgtttgtttttactcctttccctcactttctccagtgctcaactgttagatattaatcttggcaaactgcttaatcttgtggattttgtagatggtttcaaatgactgaactgcattcagatttacgagtgaaaggaaaaattgcattagttggttgcatgaactttgaagggcagatattactgcacaaactgccatctcgcttcatttttttaactatgcatttgagtacagactaatttttaaaatatgctaaactggaagattaaacagatgtggcccaaactgttctggatcaggaaagtcatactgttcactttcaagttggctgtcccccccgccgcccccccccacccccatatgtacagatgataatagggtgtggaatgtcgtcagtggcaaacatttcacagattattttgtttctgtcttcaacatttttgacactgtgctaatagttatattcagtacatgaaaagatactactgtgttgaaagccttttaggaaattttgacagtatttttgtacaaaacatttttttgaaaaaatacttgttaatttattctattttaatttgccaatgtcaataaaaagttaagaaataaaaaaaaaaaaaaaaaa

SEQ ID NO: 660 - protein, 270 aa, Homo sapiens
MADHMMAMNHGRFPDGTNGLHHHPAHRMGMGQFPSPHHHQQQQPQHAFNALMGEHIHYGAGNMNATSGIRHAMGPGTVNGGHPPSALAPAARFNNSQFMGPPVASQGGSLPASMQLQKLNNQYFNHHPYPHNHYMPDLHPAAGHQMNGTNQHFRDCNPKHSGGSSTPGGSGGSSTPGGSGSSSGGGAGSSNSGGGSGSGNMPASVAHVPAAMLPPNVIDTDFIDEEVLMSLVIEMGLDRIKELPELWLGQNEFDFMTDFVCKQQPSRVSC

SEQ ID NO: 661 - DNA, 1692 bp, Homo sapiens
ctggggtttgggggaccgagccgctccgggttcgggatgctgaggagaccgcgggcccgcgccagcctcccacacacacacactctcccggcgcctcggccggccgggcgcggtgtgcaggggtgaggcggtgtctccaggctgaggagggacgcggaggagggtccggcgcggccccgggactggagggtgagtccctcacaaagggcggagcggggctgtcacctggagatcacggagggaagttcatccatgagctcggatttcccacattacaacttcaggatgcctaatattggattccagaatctgcctctcaacatatatattgtggtttttggtactgctatatttgtcttcatccttagtttactcttctgttgctacttgattaggctaagacatcaagcacacaaagaattttatgcctacaaacaggttatattaaaagagaaagtaaaagaattgaatttacatgagctctgtgcagtgtgcctagaagacttcaagcctcgagatgagttggggatttgcccatgtaagcacgccttccacagaaagtgccttattaagtggctggaggttcgtaaagtgtgtcccctgtgcaacatgccagttctacagctggcccagttgcacagtaagcaggaccgtggaccccctcaggggccccttcctggggcagagaacattgtatagcttaccgcaaggatcagactgttgctggacacgacgtctgtgtggagccaggaggaacacatgtggtgtctgtatggctgctctctacctaggacaccagctgccacttcttttgcctcatgaagaactcttgggccagccaaactgggaacctaggtgtctgggtcttgtgacaaccaaagcactttgacactaccccctgccgagagaagaggagtggatgagcctgcgggtttgcctcaagaaacttcatgagggtctcttactaactccattacactctctctcctggagcctcatctccatgtcaagcaggagggtaaagaagggaactaagagcaggtctttcaagccacacccccacctgcggatggatgggtttctctgtaggccatgcaggcctttgtcgcagcaaaccttcccagcagcccttgagccaagtaaaaccagcacaaccagccaccagtggttggtgaggcagtgcccacaaggctcatgttgtatgcctttgataaggccatcttggctttgagtagcagtgttcctcgtcacccatttccccctcaggattacaacacctgctatcaaatcatctaagctgaaaacatgagatgcgcttggaaaggcctagtcagaagccatttcctcttatcatttccctctcctatgcaccagtaaggcccgtccagagccccagcagggagtgggccctgagtccacactgtccctgagtgatccaggaggctgcccacatccccacatgtgcactgtggttccagtgtagctgctgtgagcccactgccactgcctcagaagggagccactgtgaacctcttggctccaaagagcagtggctttttgagaatggcccatacttctggcccggctggatgaagggaatgccgaccctttggcctctccccctccttccatctcttctctctcttgccctatctctctttctacttcagaaaaaaaaaaaaaaaaaaaaaa

SEQ ID NO: 662 - protein, 148 aa, Homo sapiens
MSSDFPHYNFRMPNIGFQNLPLNIYIVVFGTAIFVFILSLLFCCYLIRLRHQAHKEFYAYKQVILKEKVKELNLHELCAVCLEDFKPRDELGICPCKHAFHRKCLIKWLEVRKVCPLCNMPVLQLAQLHSKQDRGPPQGPLPGAENIV

SEQ ID NO: 663 - DNA, 3287 bp, Homo sapiens
atggcgctggctgtcttgcgggtcctggagccctttccgaccgagacacccccgttggcagtgctgctgccacccgggggcccgtggccggcggcggagctgggcctggtgctggccctgaggcctgcaggggagagcccggcagggccggcgctgctggtggcagccctggaggggccggacgcgggcaccgaagagcagggtcccgggccgccgcagctactggttagccgcgcgctgctgcggctcctggcactgggctccggggcctgggtgcgggcgcgggcggtgcggcggcccccggcgctaggttgggcactgcttggcacctcgctggggcctgggctcggaccgcgagtcgggccgctgctggtgaggcgcggagagaccctcccagttcccggaccgcgggtgctggagacgcggccggcgttgcaagggctgctgggcccagggactcggctggctgtgactgagctccgcgggcgggccagactgtgtccagagtctggggacagcagtcggcccccacccccgcccgtggtgtcctcctttgcggtttctggcacagtgcggcgactccagggagttctgggagggactggagattcactaggggtgagccggagctgtctccgtggccttggcctcttccagggcgaatgggtgtgggtggcccaggccagagagtcatcgaacacttcacagccgcacttggctagggtgcaggtcctagaacctcgctgggacctctctgatagactgggacccggctctggaccgctgggagagcccctcgctgacggactggcgcttgtccctgccactttggcttttaatcttggctgtgaccccctggaaatgggagagctcagaattcagaggtacttggaaggctccatcgcccctgaagacaaaggaagctgctcattgctgcctgggcctccatttgccagagagttacacatcgaaattgtgtcttctccccactacagcactaatggaaattatgacggtgttctttaccggcactttcagatacccagggtagtccaggaaggggatgttctatgtgtgccaacaattgggcaagtagagatcctggaaggaagtccagagaaactgcccaggtggcgggaaatgttttttaaagtgaagaaaacagttggggaagctccagatggaccagccagtgcctacttggccgacaccacccatacctccttgtacatggtgggttctaccctgagccctgttccatggctcccttcagaggaatccactctctggagcagtttgtctcctccaggcctggaggccttggtgtctgaactctgtgctgtcctgaagcctcgcctccagccagggggtgccctgctgacaggaactagcagtgtccttctacggggccccccaggctgtgggaagaccacagtagttgctgctgcctgtagtcaccttgggctccacttactgaaggtgccctgctccagcctctgtgcagaaagtagtggggctgtggagacaaaactgcaggccatcttctcccgggcccgccgttgccggcctgcagtcctgttgctcacagctgtggaccttctgggccgggaccgtgatgggctgggtgaggatgcccgtgtgatggctgtgctgcgtcacctcctcctcaatgaggaccccctcaacagctgccctcccctcatggttgtggccaccacaagccgggcccaggacctgcctgctgatgtgcagacagcatttcctcatgagctcgaggtgcctgctctgtcagaggggcagcggctcagcatcctgcgggccctcactgcccaccttcccctgggccaggaggtgaacttggcacagctagcacggcggtgtgcaggctttgtggtaggggatctctatgcccttctgacccacagcagccgggcagcctgcaccaggatcaagaactcaggtttggcaggtggcttgactgaggaggatgagggggagctgtgtgctgccggctttcctctcctggctgaggactttgggcaggcactggagcaactgcagacagctcactcccaggccgttggagcccccaagatcccctcagtgtcctggcatgatgtgggtgggctgcaggaggtgaagaaggagatcctggagaccattcagctccccctggagcaccctgagctactgagcctgggcctgagacgctcaggccttctgctccatgggccccctggcaccggcaagacccttctggccaaggcagtagccactgagtgcagccttaccttcctcagcgtgaaggggccagagctcattaacatgtatgtgggccaaagtgaggagaatgtgcgggaagtgtttgccagggccagggctgcagctccatgcattatcttctttgatgaactggactctttggccccaagccgggggcgaagtggagattctggaggagtgatggacagggtggtgtctcagctccttgccgagctagatgggctgcacagcactcaggatgtgtttgtgattggagccaccaacagaccagatctcctggaccctgcccttctgcggcctggcagatttgacaagctggtgtttgtgggggcaaatgaggaccgggcctcccagctacgcgttctaagtgccatcacacgcaaattcaagctagagccatctgtgagcctggtaaacgtgctagattgctgccctccccagctgacgggcgcggacctctactctctctgctctgatgctatgacagctgccctcaaacgcagggttcatgacctggaggaagggctggaacaaggtagctcagcactgatgctcaccatggaggacttgctgcaggctgccgcccggctgcaaccctcagtcagtgagcaggagctgctccggtacaagcgcatccagcgcaagtttgctgcctgctaggagccccccagggtctgggaccccgctcagcatggctgcaggtaccttgatagcccacagagagatctgggaaggaagggctcctcctcaggctgctgccaacccacctggaggccacctccctccaggagatcccagggtgcaaagtggcattgagacagcagcaacagctcaagagatatctcctgcctacttgcccctccttccaggccggctctaagagaaaggcccatctactcaggaagagggccagggccttgggttctggggattgggccctgagagggctagttctgtggctgaaaataaagcatgtcccgccccctaaaaaaaaaaaaaaaaaa

SEQ ID NO: 664 - protein, 980 aa, Homo sapiens
MALAVLRVLEPFPTETPPLAVLLPPGGPWPAAELGLVLALRPAGESPAGPALLVAALEGPDAGTEEQGPGPPQLLVSRALLRLLALGSGAWVRARAVRRPPALGWALLGTSLGPGLGPRVGPLLVRRGETLPVPGPRVLETRPALQGLLGPGTRLAVTELRGRARLCPESGDSSRPPPPPVVSSFAVSGTVRRLQGVLGGTGDSLGVSRSCLRGLGLFQGEWVWVAQARESSNTSQPHLARVQVLEPRWDLSDRLGPGSGPLGEPLADGLALVPATLAFNLGCDPLEMGELRIQRYLEGSIAPEDKGSCSLLPGPPFARELHIEIVSSPHYSTNGNYDGVLYRHFQIPRVVQEGDVLCVPTIGQVEILEGSPEKLPRWREMFFKVKKTVGEAPDGPASAYLADTTHTSLYMVGSTLSPVPWLPSEESTLWSSLSPPGLEALVSELCAVLKPRLQPGGALLTGTSSVLLRGPPGCGKTTVVAAACSHLGLHLLKVPCSSLCAESSGAVETKLQAIFSRARRCRPAVLLLTAVDLLGRDRDGLGEDARVMAVLRHLLLNEDPLNSCPPLMVVATTSRAQDLPADVQTAFPHELEVPALSEGQRLSILRALTAHLPLGQEVNLAQLARRCAGFVVGDLYALLTHSSRAACTRIKNSGLAGGLTEEDEGELCAAGFPLLAEDFGQALEQLQTAHSQAVGAPKIPSVSWHDVGGLQEVKKEILETIQLPLEHPELLSLGLRRSGLLLHGPPGTGKTLLAKAVATECSLTFLSVKGPELINMYVGQSEENVREVFARARAAAPCIIFFDELDSLAPSRGRSGDSGGVMDRVVSQLLAELDGLHSTQDVFVIGATNRPDLLDPALLRPGRFDKLVFVGANEDRASQLRVLSAITRKFKLEPSVSLVNVLDCCPPQLTGADLYSLCSDAMTAALKRRVHDLEEGLEQGSSALMLTMEDLLQAAARLQPSVSEQELLRYKRIQRKFAAC

SEQ ID NO: 665 - DNA, 3915 bp, Homo sapiens
gtggggtggggtggggctgggggcttgtcgccctttcaggctccaccctttgcggagattataaatagtcatgatcccagcgagacccagagatgcctgtaatggtgagactttggatccttcctgaggacgtggagaaaactttctgctgagaaggacattttgaaggttttgttggctgaaaaagctgtttctggaatcacccctagatctttcttgaagacttgaattagattacagcgatggggacacagaaggtcaccccagctctgatatttgccatcacagttgctacaatcggctctttccaatttggctacaacactggggtcatcaatgctcctgagaagatcataaaggaatttatcaataaaactttgacggacaagggaaatgccccaccctctgaggtgctgctcacgtctctctggtccttgtctgtggccatattttccgtcgggggtatgatcggctccttttccgtcggactcttcgtcaaccgctttggcaggcgcaattcaatgctgattgtcaacctgttggctgtcactggtggctgctttatgggactgtgtaaagtagctaagtcggttgaaatgctgatcctgggtcgcttggttattggcctcttctgcggactctgcacaggttttgtgcccatgtacattggagagatctcgcctactgccctgcggggtgcctttggcactctcaaccagctgggcatcgttgttggaattctggtggcccagatctttggtctggaattcatccttgggtctgaagagctatggccgctgctactgggttttaccatccttcctgctatcctacaaagtgcagcccttccattttgccctgaaagtcccagatttttgctcattaacagaaaagaagaggagaatgctaagcagatcctccagcggttgtggggcacccaggatgtatcccaagacatccaggagatgaaagatgagagtgcaaggatgtcacaagaaaagcaagtcaccgtgctagagctctttagagtgtccagctaccgacagcccatcatcatttccattgtgctccagctctctcagcagctctctgggatcaatgctgtgttctattactcaacaggaatcttcaaggatgcaggtgttcaagagcccatctatgccaccatcggcgcgggtgtggttaatactatcttcactgtagtttctctatttctggtggaaagggcaggaagaaggactctgcatatgataggccttggagggatggctttttgttccacgctcatgactgtttctttgttattaaaggataactataatgggatgagctttgtctgtattggggctatcttggtctttgtagccttctttgaaattggaccaggccccattccctggtttattgtggccgaactcttcagccagggcccccgcccagctgcgatggcagtggccggctgctccaactggacctccaacttcctagtcggattgctcttcccctccgctgctcactatttaggagcctacgtttttattatcttcaccggcttcctcattaccttcttggcttttaccttcttcaaagtccctgagacccgtggcaggacttttgaggatatcacacgggcctttgaagggcaggcacacggtgcagatagatctggaaaggacggcgtcatggagatgaacagcatcgagcctgctaaggagaccaccaccaatgtctaagtcgtgcctccttccacctccctcccggcatgggaaagccacctctccctcaacaagggagagacctcatcaggatgaacccaggacgcttctgaatgctgctacttaattcctttctcatcccacgcactccatgagcaccccaaggctgcggtttgttggatcttcaatggctttttaaattttatttcctggacatcctcttctgcttaggagagaccgagtgaacctaccttcatttcaggagggattggccgcttggcacatgacaactttgccagcttttcctcccttgggttctgatattgccgcactaggggatataggagaggaaaagtaaggtgcagttcccccaacctcagacttaccaggaagcagatacatatgagtgtggaagccggagggtgtttatgtaagagcaccttcctcacttccatacagctctacgtggcaaattaacttgagttttatttattttatcctctggtttaattacataatttttttttttttactttaagtttcaggatacatgtgccgaatgtgcaggtttgttacataggtatatatatgccatgatggaaatatttatttttttaagcgtaattttgccaaataataaaaacagaaggaaattgagattagagggaggtgtttaaagagaggttatagagtagaagatttgatgctggagaggttaaggtgcaataagaatttagggagaaatgttgttcattattggagggtaaatgatgtggtgcctgaggtctgtacgttacctcttaacaatttctgtccttcagatggaaactctttaacttctcgtaaaagtcatatacctatataataaagctactgatttccttggagcttttttctttaagataatagtttacatgtagtagtacttgaaatctaggattattaactaatatgggcattgtagttaatgatggttgatgggttctaattttggatggagtccagggaagagaaagtgatttctagaaagcctgttcccctcactggatgaaataactccttcttgtagtagtctcattacttttgaagtaatcccgccacctatctcgtgggagagccatccaaataagaaacctaaaataattggttcttggtagagattcattatttttccactttgttctttaggagattttaggtgttgattttctgttgtattttaactcatacctttaaaggaattccccaaagaatgtttatagcaaacttggaatttgtaacctcagctctgggagaggatttttttctgagcgattattatctaaagtgtgttgttgctttaggctcacggcacgcttgcgtatgtctgttaccatgtcactgtggtcctatgccgaatgccctcaggggacttgaatctttccaataaaccaggtttagacagtatgagtcaatgtgcagtgtagcccacacttgagaggatgaatgtatgtgcactgtcactttgctctgggtggaagtacgttattgttgacttattttctctgtgtttgttcctacagcccctttttcatatgttgctcagtctccctttcccttcttggtgcttacacatctcagaccctttagccaaacccttgtcagtgacagtattttggttcttagttctcactgttccctctgctcctggagcctttgaataaaaatgcacgtagctgaggccggatgcggtggctcacgcctgtaatcccagcactttgggaggcctaggcgggcggtcaggggttcgagaccagtctggccaacatcgtgaaaccctgtctctactaaaaatgcaaaaattagccgggcgtggtggcgggcgcctgtaatcccagctacttgggaagctgaggcgggagaatcatgtgaacccgggacgcaggggttgcagtgagcggagatcgcatcattgcactctagcctgggccacagggcgagactccgtctcaaaaaaaaaaaaatgcacatagctatcgagtgtgctttagcttgaaaaggtgaccttgcaacttcatgtcaactttctggctcctcaaacagtaggttggcagtaaggcagggtcccatttctcactgagaagattgtgaatatttccatatggattttctattgttactctggttctttgttttaaaataaaaattctgaatgtacacg

SEQ ID NO: 666 - protein, 496 aa, Homo sapiens
MGTQKVTPALIFAITVATIGSFQFGYNTGVINAPEKIIKEFINKTLTDKGNAPPSEVLLTSLWSLSVAIFSVGGMIGSFSVGLFVNRFGRRNSMLIVNLLAVTGGCFMGLCKVAKSVEMLILGRLVIGLFCGLCTGFVPMYIGEISPTALRGAFGTLNQLGIVVGILVAQIFGLEFILGSEELWPLLLGFTILPAILQSAALPFCPESPRFLLINRKEEENAKQILQRLWGTQDVSQDIQEMKDESARMSQEKQVTVLELFRVSSYRQPIIISIVLQLSQQLSGINAVFYYSTGIFKDAGVQEPIYATIGAGVVNTIFTVVSLFLVERAGRRTLHMIGLGGMAFCSTLMTVSLLLKDNYNGMSFVCIGAILVFVAFFEIGPGPIPWFIVAELFSQGPRPAAMAVAGCSNWTSNFLVGLLFPSAAHYLGAYVFIIFTGFLITFLAFTFFKVPETRGRTFEDITRAFEGQAHGADRSGKDGVMEMNSIEPAKETTTNV

SEQ ID NO: 667 - DNA, 1410 bp, Homo sapiens
aaagcctggattgtaaccagattttcttttttcccccttctcagctgtagatatgatatctcctttcagggccccagcttaagggcaaagtgagttaatgtgtagacaaaggcgagggacaagagagagttaacatctagacagtggaaaaagccatggtgtgtggtttctgggaaccaccaacacttgcaggtttagctttttcccagggttgactacaagaaagaaaaccatgtttttgcaagattaaaatgtggttgagtgtgcctaaattaaccatccccatttttatcatatttccaccatcacttcagggttttaagagtcagtgctcacctgggcggagctggtagtacattttgcttcttagaaagctaagtcctgggttccgtctgattttaggttccaggaacttcctgagaacacccgatcgcagagggtaattttctggagtttgttttgcagggatagctgggagtatggccaccctgctccacgatgcggtaatgaatccagcagaagtggtgaagcagcgcttgcagatgtacaactcgcagcaccggtcagcaatcagctgcatccggacggtgtggaggaccgaggggttgggggccttctaccggagctacaccacgcagctgaccatgaacatccccttccagtccatccacttcatcacctatgagttcctgcaggagcaggtcaacccccaccggacctacaacccgcagtcccacatcatctcaggcgggctggccggggccctcgccgcggccgccacgacccccctggacgtctgtaagacccttctgaacactcaggagaacgtggccctctcgctggccaacatcagcggccggctgtcgggtatggccaatgccttccggacggtgtaccagctcaacggcctggccggctacttcaaaggcatccaggcgcgtgtcatctaccagatgccctccaccgccatttcttggtctgtctatgagttcttcaagtactttctcaccaagcgccagctggaaaatcgagctccatactaaaggaagggatcatagaatcttttcttaaagtcattctctgcctgcatccagccccttgccctctcctcacacgtagatcatttttttttttgcagggtgctgcctatgggccctctgctccccaatgccttagagagaggaggggacggcacggccgctcaccggaaggctgtgtgcggggacatccgaggtggtggtggacaggaaggacttgggaaggggagcgagaaattgctttttctcttcctccctgggcagaatgtagcttttctgcttcactgtggcagcctcctccctggatccttagatcccagaggagggaagaaaatttgcagtgactgaaaacagtaaaaaaaaaaaaaaaaaa

SEQ ID NO: 668 - protein, 187 aa, Homo sapiens
MATLLHDAVMNPAEVVKQRLQMYNSQHRSAISCIRTVWRTEGLGAFYRSYTTQLTMNIPFQSIHFITYEFLQEQVNPHRTYNPQSHIISGGLAGALAAAATTPLDVCKTLLNTQENVALSLANISGRLSGMANAFRTVYQLNGLAGYFKGIQARVIYQMPSTAISWSVYEFFKYFLTKRQLENRAPY

SEQ ID NO: 669 - DNA, 983 bp, Homo sapiens
cgcaggggtcccccggccgccgcgatgcagaaatacgagaaactggaaaagattggggaaggcacctacggaactgtgttcaaggccaaaaaccgggagactcatgagatcgtggctctgaaacgggtgaggctggatgacgatgatgagggtgtgccgagttccgccctccgggagatctgcctactcaaggagctgaagcacaagaacatcgtcaggcttcatgacgtcctgcacagcgacaagaagctgactttggtttttgaattctgtgaccaggacctgaagaagtattttgacagttgcaatggtgacctcgatcctgagattgtaaagtcattcctcttccagctactaaaagggctgggattctgtcatagccgcaatgtgctacacagggacctgaagccccagaacctgctaataaacaggaatggggagctgaaattggctgattttggcctggctcgagcctttgggattcccgtccgctgttactcagctgaggtggtcacactgtggtaccgcccaccggatgtcctctttggggccaagctgtactccacgtccatcgacatgtggtcagccggctgcatctttgcagagctggccaatgctgggcggcctctttttcccggcaatgatgtcgatgaccagttgaagaggatcttccgactgctggggacgcccaccgaggagcagtggccctctatgaccaagctgccagactataagccctatccgatgtacccggccacaacatccctggtgaacgtcgtgcccaaactcaatgccacagggagggatctgctgcagaaccttctgaagtgtaaccctgtccagcgtatctcagcagaagaggccctgcagcacccctacttctccgacttctgtccgccctaggccccgggacccccgcctccaggctgggcctggcctatttaagccccctcttgagagggtgagacagtgggggtgcctgg

SEQ ID NO: 670 - protein, 292 aa, Homo sapiens
MQKYEKLEKIGEGTYGTVFKAKNRETHEIVALKRVRLDDDDEGVPSSALREICLLKELKHKNIVRLHDVLHSDKKLTLVFEFCDQDLKKYFDSCNGDLDPEIVKSFLFQLLKGLGFCHSRNVLHRDLKPQNLLINRNGELKLADFGLARAFGIPVRCYSAEVVTLWYRPPDVLFGAKLYSTSIDMWSAGCIFAELANAGRPLFPGNDVDDQLKRIFRLLGTPTEEQWPSMTKLPDYKPYPMYPATTSLVNVVPKLNATGRDLLQNLLKCNPVQRISAEEALQHPYFSDFCPP

SEQ ID NO: 671 - DNA, 6746 bp, Homo sapiens
ggcacgaggcggggagctgtcgcgggcagcgcgccctcgggaggacgtggccccggcccccgcccgcagtgggcccgaccctcatggccctgagcaaagggctgcggctgctggggcgcctgggggccgagggggactgtagcgtgctgctggaggcgcgcggccgcgacgactgcctgctgttcgaggccggcacggtggccacgctggctccagaagaaaaggaagtcattaaaggacagtatggcaagctcacggacgcgtacggctgcctgggggagctgaggctgaaatctggtggcacgtctctgagcttcctggtgttggtgacaggctgcacatctgtgggcagaattccagatgctgaaatctacaaaatcactgccactgacttttaccctcttcaggaagaggccaaggaggaggaacgcctcatagctttgaagaaaatcctcagctcgggggtgttctatttctcatggccaaacgatgggtctcgctttgacctgactgtccgcacgcagaagcagggggatgacagctctgaatgggggaactccttcttctggaaccagctgttgcacgtgcccttgaggcagcaccaggtgagctgctgtgactggctgctgaagatcatctgcggggtggtcaccatccgcaccgtgtatgcctcccacaagcaggccaaggcctgcctcgtctctcgcgttagctgtgagcgcacaggcactcgcttccacacccgtggcgtgaacgacgacggccatgtgtccaacttcgtggagacagagcagatgatttacatggacgatggagtgtcatcttttgtccagatcagaggctccgttccgctgttctgggaacagccagggcttcaggttggctcccatcatctgagactccacagaggcctggaagccaatgcccctgctttcgacaggcacatggtgcttctgaaggagcagtacgggcagcaggtggtcgtgaaccttctgggaagcagaggcggagaggaggtgctcaacagagccttcaagaagctgctctgggcttcttgccacgcgggcgacacgcctatgatcaattttgacttccatcagtttgccaaaggtgggaagctagagaaattggagaccctcttgaggccacagttaaagctgcactgggaagacttcgatgtgttcacaaagggggagaacgtcagtccacgttttcagaaaggcactttgcggatgaactgtcttgactgcctggaccgaaccaacactgtgcagagcttcatcgcgctcgaggtcctgcatctgcagctcaagaccctggggctgagttcaaaacccatcgttgaccgctttgtggagtccttcaaagccatgtggtctctgaatggccacagcctgagcaaggtgttcacaggcagcagagccctggaagggaaggccaaggtggggaagctgaaggatggagcccggtccatgtctcgaaccatccagtccaacttcttcgacggggtgaagcaggaggccatcaagctgctgctggttggggacgtctacggcgaggaggtggcagacaaagggggcatgctgctggacagcacggcgctcctggtgactcccaggatcctgaaagctatgactgagcgtcagtccgaattcacaaatttcaagcggatccggattgctatggggacctggaacgtgaacggaggaaagcagttccggagcaacgtgctcaggacggcggagctgacagactggctgctcgactcgccccagctctcgggagctaccgactcccaggatgacagcagcccagctgacatatttgctgtggggtttgaagagatggtggaattgagcgcagggaatattgtcaatgccagtactaccaacaagaagatgtggggtgaacagcttcagaaagccatctcacgctctcatagatacattctgttgacttcggcacagctggtgggcgtctgtctttatatctttgtacgtccataccatgtcccgttcatcagggacgtagccatcgacacagtgaagacgggcatggggggcaaggcggggaacaagggcgccgtcggcatccgcttccagttccacagcaccagcttctgcttcatatgtagtcacctgacggccgggcagtcccaggtgaaggagcggaatgaagactacaaggagatcacccagaaactctgcttcccaatggggagaaatgttttttctcatgattatgtattttggtgtggcgatttcaactaccgcattgatcttacttatgaagaagtcttctattttgttaaacgccaagactggaagaaacttctggaatttgatcaactacagctacagaaatcaagtggaaaaatttttaaggactttcacgaaggagccattaactttggacccacctacaagtatgacgttggctcagccgcctacgatacaagcgacaaatgccgcacccccgcctggacagacagggtgctgtggtggaggaagaaacatccctttgataaaacagctggagaactcaaccttctagacagtgatctagatgttgacaccaaagtcagacacacctggtctcctggtgccctgcagtattatggtcgtgcggagctacaagcgtctgatcacagacctgtgctggcgatcgtggaggtggaagttcaggaagtcgatgtgggtgctcgggagagggttttccaggaagtgtcctccttccagggccccctggatgccactgttgtagtaaaccttcaatcaccgaccttagaagagaaaaacgagtttccagaggacctgcgtactgagctcatgcagaccttggggagttatgggacaattgttcttgtcaggatcaaccaagggcagatgctggtaacttttgcagacagtcactcggctctcagtgtcctggacgtggacggtatgaaggtgaaaggcagagcagtgaagattagaccgaagaccaaggactggctgaaaggtttgcgagaggagatcattcggaaacgagacagcatggcccccgtgtctcccactgccaactcctgtttgctggaggaaaactttgacttcacaagtttggactatgagtcagaaggggatattcttgaagacgatgaagactacttggtggatgaattcaatcagcctggagtctcggacagtgaactcgggggagacgacctctctgatgtccccggccccacagcactggctcctcccagcaagtcacctgctctcaccaaaaagaagcagcatccaacgtacaaagatgacgcggacctggtggagctcaagcgggagctggaagccgtcggggagttccgccaccgttctccgagcaggtctctgtcggtccccaaccggcctcggccacctcaacccccgcagagacccccccctccaaccggtttaatggtgaaaaagtcggcttcagatgcgtccatctcctccggcacccatggacagtattcaattttgcagacggcaagacttctaccaggagcacctcagcaacctcccaaggctcggactggaataagtaaaccttataatgtcaagcagatcaaaaccaccaatgcccaggaggcagaagcagcaatccggtgtctcctggaagccagaggaggtgcctccgaagaagccctaagtgccgtggccccaagggaccttgaagcatcctctgaaccagagcccacaccgggggcagccaaaccagagaccccacaggcgcccccactccttccccgtcggcccccacccagagttcctgccatcaagaagccaaccttgagaaggacaggaaagcccctgtcaccggaagaacagtttgagcaacagactgtccattttacaatcgggcccccggagacaagcgttgaggcccctcctgtcgtgacagcccctcgagtccctcctgttcccaaaccaagaacatttcagcctgggaaagctgcagagaggccaagccacaggaagccagcatcagacgaagcccctcctggggcaggagcctctgtgccaccacctctggaggcgccgcctcttgtgcccaaggtacccccgaggaggaagaagtcagcccccgcagccttccacctgcaggtcctgcagagcaacagccagcttctccagggcctcacttacaatagcagtgacagcccctctgggcacccacctgccgcgggcaccgtcttcccacaaggggactttctcagcacttcatctgctacaagccccgacagcgatggcaccaaagcgatgaagccagaggcagccccacttcttggtgattatcaggaccccttctggaaccttcttcaccaccctaaactgttgaataacacttggctttctaagagctcagaccctttggactcaggaaccaggagccccaaaagagatcccatagacccagtgtcagctggcgcttcagctgccaaggcagagctgccaccagatcatgaacacaaaaccttaggtcactgggtgacaatcagtgaccaagaaaagaggacagcactgcaggtgtttgacccactggcaaaaacatgactgagcagctttgaaggctgcagtcctatagaatgcataccttcctccctctagacatccctccaccagaagagacatctatttaaaggcacactggccaaaacgtttgtgcatctgtcactctcgtgtagtttacaaaaatcgtgtctcttattcagtaagatggttactcagccaccaaaatatatttcactcaaggcttgtacatctgaagtttgctcttcaaggaatgggaaccttcctgttaaattcggtgtatggattttaagaaaggaatctagccaatgaggtccaagaagttctcacccattgaatttttaaatggctgttcagttcatgttgtacgtgatggagatttgtcttttgttttatttgcattttacagatttggtataacattttggggagccacctgaaggttgatgtataaagtaaggattagagaaagaggtcgttgtgaccattaatagctgtcctggcccacttaaacaaggttacaaaaaatcagagtcggaagcagccaaataggtcaacctaatgactagactgtacattcccatgagccttcatgtttaagtgtgtacatgtgcgttaaccttgatgatgcgtgaatcccgagggagccggtggcatacaccgttagcttaaccttagcttaaactagctgaaggctcctgtgccatgtcttagacattgcatgccctatcaattactataatcctgagccatggtgtgctactgaaaccaatttttatccaccatctagtccttattaaatgaaacctcacggatcctttgttccgcttatattccatgcataccacataaaagcacacagtgcgaaaactcttgctgatacgcgatattgattctcattgttagaatatggagagtgtttcagcctcgtctgtccggctggagcttcgggatggaaagtgctatgtgtccctgcatataagaatcaccaggccagtgtttctgggtttgcttgtctatatgtttgtctatattttttgcctatacatttttcccacgtttccaacagcacttctcacctattcaataactgaaaaagacattaccatagtgctttacatttttaaagtaatgttacaaggtctggaatccatttggagcagataccgtgttttcgctatttaataagaagttcagtagtgaaatcttactgtaccgcctgttgtatctgggagcctcgtacagaggctcgcacagcagtgatcaagtgtcatcccttacgtgactgggggatgtctgtcctaaaagctgactgctaggatagtaaggatcatcttgcctgggctatgccactgtcttgttaccaattagacatctggaatttcataattagttttcattgtcactgtcaagatatattgcagattacttaaatatggccatcaaaacaaaagttacaacacgtatctcttttcatctgaaaactaatacctggaaaaggataaaaaaaaaaaggaatccgtgacccacagagctagacagataagatgcatagttgaccagtcataaaaggcggtgtttaagtgatcaggatgccgttggtggcatttacgtgctttatatgatttttacctctgtaacaaacacaagaaataaacagaatggtccttaacagagtttgggggagagagcaagatgggttccttggagaagctgatttgccaagatgcacatcgctattaacagccagagtcataaatgaaatgaaattgaagaattcattcaaatgctcttttccctataacctcttttctcaccaaaaaggagataaatttgaaaacagataaatgtaacaaccagtcaaagaagcaggggaaaagtaagctcctccaaagttgcttgcagtgctggaaatagatctcatttttaggttttctcttcgttccagataccaaataaatgggacagagaataaaatttttgttaaaatatgtgctcatctcctaagtagctcttcagagtctgaccgtaagtaaaaacacacagaattgtgttgactgggggaggtgaatcacaaaaaagttacgaggagtttaagagttaaatattatttgatcgtggctgtcaaatttagtgaacaacatagattggatttggagttggtagtaagtatggttctcataccagaattctctt

SEQ ID NO: 672 - protein, 1496 aa, Homo sapiens
MALSKGLRLLGRLGAEGDCSVLLEARGRDDCLLFEAGTVATLAPEEKEVIKGQYGKLTDAYGCLGELRLKSGGTSLSFLVLVTGCTSVGRIPDAEIYKITATDFYPLQEEAKEEERLIALKKILSSGVFYFSWPNDGSRFDLTVRTQKQGDDSSEWGNSFFWNQLLHVPLRQHQVSCCDWLLKIICGVVTIRTVYASHKQAKACLVSRVSCERTGTRFHTRGVNDDGHVSNFVETEQMIYMDDGVSSFVQIRGSVPLFWEQPGLQVGSHHLRLHRGLEANAPAFDRHMVLLKEQYGQQVVVNLLGSRGGEEVLNRAFKKLLWASCHAGDTPMINFDFHQFAKGGKLEKLETLLRPQLKLHWEDFDVFTKGENVSPRFQKGTLRMNCLDCLDRTNTVQSFIALEVLHLQLKTLGLSSKPIVDRFVESFKAMWSLNGHSLSKVFTGSRALEGKAKVGKLKDGARSMSRTIQSNFFDGVKQEAIKLLLVGDVYGEEVADKGGMLLDSTALLVTPRILKAMTERQSEFTNFKRIRIAMGTWNVNGGKQFRSNVLRTAELTDWLLDSPQLSGATDSQDDSSPADIFAVGFEEMVELSAGNIVNASTTNKKMWGEQLQKAISRSHRYILLTSAQLVGVCLYIFVRPYHVPFIRDVAIDTVKTGMGGKAGNKGAVGIRFQFHSTSFCFICSHLTAGQSQVKERNEDYKEITQKLCFPMGRNVFSHDYVFWCGDFNYRIDLTYEEVFYFVKRQDWKKLLEFDQLQLQKSSGKIFKDFHEGAINFGPTYKYDVGSAAYDTSDKCRTPAWTDRVLWWRKKHPFDKTAGELNLLDSDLDVDTKVRHTWSPGALQYYGRAELQASDHRPVLAIVEVEVQEVDVGARERVFQEVSSFQGPLDATVVVNLQSPTLEEKNEFPEDLRTELMQTLGSYGTIVLVRINQGQMLVTFADSHSALSVLDVDGMKVKGRAVKIRPKTKDWLKGLREEIIRKRDSMAPVSPTANSCLLEENFDFTSLDYESEGDILEDDEDYLVDEFNQPGVSDSELGGDDLSDVPGPTALAPPSKSPALTKKKQHPTYKDDADLVELKRELEAVGEFRHRSPSRSLSVPNRPRPPQPPQRPPPPTGLMVKKSASDASISSGTHGQYSILQTARLLPGAPQQPPKARTGISKPYNVKQIKTTNAQEAEAAIRCLLEARGGASEEALSAVAPRDLEASSEPEPTPGAAKPETPQAPPLLPRRPPPRVPAIKKPTLRRTGKPLSPEEQFEQQTVHFTIGPPETSVEAPPVVTAPRVPPVPKPRTFQPGKAAERPSHRKPASDEAPPGAGASVPPPLEAPPLVPKVPPRRKKSAPAAFHLQVLQSNSQLLQGLTYNSSDSPSGHPPAAGTVFPQGDFLSTSSATSPDSDGTKAMKPEAAPLLGDYQDPFWNLLHHPKLLNNTWLSKSSDPLDSGTRSPKRDPIDPVSAGASAAKAELPPDHEHKTLGHWVTISDQEKRTALQVFDPLAKT

SEQ ID NO: 673 - DNA, 1582 bp, Homo sapiens
ggcacgaggcttccccggtgcagacacccggcgaagcccacccggttttcccagcggcatttccgatgacagcttcggggctacgtgtcctgtgctgtcggagacgcacaggaagcaaagtttgtgagaagccttgggggcgactttgccttgggcacccgcatttgtgcgtctgcgaggtgcctcggtgtgcgcggagctagtttcccagtttcccgggcccctcccttctccgagcccctctagcgatttgtttaggaaaagtgatgacatgaactagtagtggagaatcgcagcgccgctccccgccctggggagggaggggagccccggagagcctgccggtgggagctggaagcaggctcccggctgagcgccccagcccgaaaggcagggtctgggtgcgggaagagggctcggagctgccttcctgctgccttggggccgcccagatgagggaacagcccgatttgcctggttctgattctccaggctgtcgtggttgtggaatgcaaacgccagcacataatggaaacaggacctgaagacccttccagcatgccagaggaaagttcccccaggcggaccccgcagagcattccctaccaggacctccctcacctggtcaatgcagacggacagtacctcttctgcaggtactggaaacccacaggcacacccaaggccctcatctttgtgtcccatggagccggagagcacagtggccgctatgaagagctggctcggatgctgatggggctggacctgctggtgttcgcccacgaccatgttggccacggacagagcgaaggggagaggatggtagtgtctgacttccacgttttcgtcagggatgtgttgcagcatgtggattccatgcagaaagactaccctgggcttcctgtcttccttctgggccactccatgggaggcgccatcgccatcctcacggccgcagagaggccgggccacttcgccggcatggtactcatttcgcctctggttcttgccaatcctgaatctgcaacaactttcaaggtccttgctgcgaaagtgctcaaccttgtgctgccaaacttgtccctcgggcccatcgactccagcgtgctctctcggaataagacagaggtcgacatttataactcagaccccctgatctgccgggcagggctgaaggtgtgcttcggcatccaactgctgaatgccgtctcacgggtggagcgcgccctccccaagctgactgtgcccttcctgctgctccagggctctgccgatcgcctatgtgacagcaaaggggcctacctgctcatggagttagccaagagccaggacaagactctcaagatttatgaaggtgcctaccatgttctccacaaggagcttcctgaagtcaccaactccgtcttccatgaaataaacatgtgggtctctcaaaggacagccacggcaggaactgcgtccccaccctgaatgcattggccggtgcccggctcatggtctgggggatgcaggcaggggaagggcagagatggcttctcagatatggcttgcaaaaaaaaaaaaaaaaaaaaaaaaaaaaaaa

SEQ ID NO: 674 - protein, 313 aa, Homo sapiens
METGPEDPSSMPEESSPRRTPQSIPYQDLPHLVNADGQYLFCRYWKPTGTPKALIFVSHGAGEHSGRYEELARMLMGLDLLVFAHDHVGHGQSEGERMVVSDFHVFVRDVLQHVDSMQKDYPGLPVFLLGHSMGGAIAILTAAERPGHFAGMVLISPLVLANPESATTFKVLAAKVLNLVLPNLSLGPIDSSVLSRNKTEVDIYNSDPLICRAGLKVCFGIQLLNAVSRVERALPKLTVPFLLLQGSADRLCDSKGAYLLMELAKSQDKTLKIYEGAYHVLHKELPEVTNSVFHEINMWVSQRTATAGTASPP

SEQ ID NO: 675 - DNA, 3975 bp, Homo sapiens
atggcgagcccgccgcggcacgggccgcccgggccggcgagcggagacggccccaacctcaacaacaacaacaacaacaacaaccacagcgtgcgcaagtgcggctacctgcgcaagcagaagcatggccacaagcgcttcttcgtgctgcgcggacccggcgcgggcggcgacaaggccacggcgggcggggggtcggcgccgcaaccgccgcggctcgagtactacgaaagcgaaaaaaattggcggagcaaggcaggcgcgccgaaacgggtgatcgctctcgactgctgcctgaacatcaacaagcgcgccgaccccaagcacaagtacctgatcgccctctacaccaaggacgagtacttcgccgtggccgccgagaacgagcaggagcaggagggctggtaccgcgcgctcaccgacctggtcagcgagggccgcgcggccgccggagacgcgccccccgccgccgcgcccgccgcgtcctgcagcgcctccctgcccggcgccgtgggcggttctgccggcgccgccggggccgaggacagctacgggctggtggctcccgccacggccgcctaccgtgaggtgtggcaggtgaacctgaagcccaagggtctgggccagagcaagaacctgacgggggtgtaccgtctgtgcctgtctgcgcgcaccatcggcttcgtgaagctcaactgcgagcagccgtcggtgacgctgcagctcatgaacatccgccgctgcggccactcggacagcttcttcttcatcgaggtgggccgctcggccgtcacaggccccggcgagctgtggatgcaggcggacgactcggtggtggcgcagaacatccacgagaccatcctggaggccatgaaggcgctcaaggagctcttcgagttccggccgcgcagtaagagccaatcgtcggggtcgtcggccacgcaccccatcagcgtccccggcgcgcgccgccaccaccacctggtcaacctgccccccagccagacgggcctggtgcgccgctcgcgcaccgacagcctggccgccaccccgccggcggccaagtgcagctcgtgccgggtgcgcaccgccagcgagggcgacggcggcgcggcggcgggagcggcggccgcgggcgccaggccggtgtcggtggctgggagccccctgagccccgggccggtgcgcgcgcccctgagccgctcgcacaccctgatcggcggctgccgggccgcgggaacaaagtggcattgcttcccggcagggggcggattgcaacacagccgttcgatgtccatgcccgtggagcatttgccgccagccgccaccagcccgggttccttgtcttccagcagcgaccacggttggggttcttacccgccgccgcccggcccgcacccgcttttgccgcatccgttgcaccacggccccggccagcggccttccagcggcagcgcttccgcttcgggctcccccagcgaccccggtttcatgtccctggacgagtacggctccagcccaggcgacctgcgcgccttctgcagccaccgaagcaacacgcccgagtccatcgcggagacgcccccggcccgagacggcggcggcggcggtgagttttacgggtacatgaccatggacaggcccctgagccactgtggccgctcctaccgccgggtctcgggggacgcggcccaggacctggaccgagggctgcgcaagaggacctactccctgaccacgccagcccggcagcggccggtgccccagccctcctctgcctcgctggatgaatacaccctgatgcgggccaccttctcgggcagcgcgggccgcctctgcccgtcctgccccgcgtcctctcccaaggtggcctaccacccctacccagaggactacggagacatcgagatcggctcccacaggagctccagcagcaacctgggggcagacgacggctacatgcccatgacgcccggcgcggcccttgcgggcagtgggagcggcagctgcaggagcgacgactacatgcccatgagccccgccagcgtgtccgcccccaagcagattttgcagcccagggccgccgccgccgccgccgccgccgtgccttttgcggggcctgcggggccagcacccacctttgcggcgggcaggacattcccggcgagtgggggcggctacaaggccagctcgcccgccgagagctcccccgaggacagtgggtacatgcgcatgtggtgcggttccaagctgtccatggagcatgcagatggcaagctgctgcccaacggggactacctcaacgtgtcccccagcgacgcggtcaccacgggcaccccgcccgacttcttctccgcagccctgcaccccggcggggagccgctcaggggcgttcccggctgctgctacagctccttgccccgctcctacaaggccccctacacctgtggcggggacagcgaccagtacgtgctcatgagctcccccgtggggcgcatcctggaggaggagcgtctggagcctcaggccaccccagggcccacccaggcggccagcgccttcggggccggccccacgcagccccctcaccctgtagtgccttcgcccgtgcggcctagcggcggccgcccggagggcttcttgggccagcgcggccgggcggtgaggcccacgcgcctgtccctggaggggctgcccagcctgcccagcatgcacgagtacccactgccaccggagcccaagagccccggcgagtacatcaacatcgactttggcgagcccggggcccgcctgtcgccgcccgcgcctcccctgctggcgtcggcggcctcgtcctcatcgctattgtccgccagcagcccggccttgtcgttgggctcaggcaccccgggcaccagcagcgacagccggcagcggtctccgctctccgactacatgaacctcgacttcagctcccccaagtctcctaagccgggcgccccgagcggccaccccgtgggctccttggacggcctcctgtcccccgaggcctcctccccgtatccgccgttgcccccgcgtccgtccgcgtccccgtcgtcgtctctgcagccgccgccaccgccgccggccccgggggagctgtaccgcctgccccccgcctcggccgttgccaccgcccagggcccgggcgccgcctcatcgttgtcctcggacaccggggacaatggtgactacaccgagatggcttttggtgtggccgccaccccgccgcaacctatcgcggcccccccgaagccagaagctgcccgcgtggccagcccgacgtcgggcgtgaagaggctgagcctcatggagcaggtgtcgggagtcgaggccttcctgcaggccagccagcccccggacccccaccgcggcgccaaggtcatccgcgcagacccgcaggggggccgccgccgccacagttccgagaccttctcctccaccacgacggtcacccccgtgtccccgtccttcgcccacaaccccaagcgccacaactcggcctccgtggaaaatgtctctctcaggaaaagcagcgagggcggcgtgggtgtcggccctggagggggcgacgagccgcccacctccccacgacagttgcagccggcgccccctttggcaccgcagggccggccgtggaccccgggtcagcccgggggcttggtcggttgtcctgggagcggtggatcgcccatgcgcagagagacctctgccggtttccagaatggtctcaagtacatcgccatcgacgtgagggaggagcccgggctgccaccccagccgcagccgccgccgccgccgcttcctcagccgggagacaagagctcctggggccggacccgaagcctcgggggtctcatcagcgctgtgggcgtcggcagcacccgcggcgggtgcggggggccgggtcccggtgcccctgccccctgcccaacaacctacgcccagcattga

SEQ ID NO: 676 - protein, 1324 aa, Homo sapiens
MASPPRHGPPGPASGDGPNLNNNNNNNNHSVRKCGYLRKQKHGHKRFFVLRGPGAGGDKATAGGGSAPQPPRLEYYESEKNWRSKAGAPKRVIALDCCLNINKRADPKHKYLIALYTKDEYFAVAAENEQEQEGWYRALTDLVSEGRAAAGDAPPAAAPAASCSASLPGAVGGSAGAAGAEDSYGLVAPATAAYREVWQVNLKPKGLGQSKNLTGVYRLCLSARTIGFVKLNCEQPSVTLQLMNIRRCGHSDSFFFIEVGRSAVTGPGELWMQADDSVVAQNIHETILEAMKALKELFEFRPRSKSQSSGSSATHPISVPGARRHHHLVNLPPSQTGLVRRSRTDSLAATPPAAKCSSCRVRTASEGDGGAAAGAAAAGARPVSVAGSPLSPGPVRAPLSRSHTLIGGCRAAGTKWHCFPAGGGLQHSRSMSMPVEHLPPAATSPGSLSSSSDHGWGSYPPPPGPHPLLPHPLHHGPGQRPSSGSASASGSPSDPGFMSLDEYGSSPGDLRAFCSHRSNTPESIAETPPARDGGGGGEFYGYMTMDRPLSHCGRSYRRVSGDAAQDLDRGLRKRTYSLTTPARQRPVPQPSSASLDEYTLMRATFSGSAGRLCPSCPASSPKVAYHPYPEDYGDIEIGSHRSSSSNLGADDGYMPMTPGAALAGSGSGSCRSDDYMPMSPASVSAPKQILQPRAAAAAAAAVPFAGPAGPAPTFAAGRTFPASGGGYKASSPAESSPEDSGYMRMWCGSKLSMEHADGKLLPNGDYLNVSPSDAVTTGTPPDFFSAALHPGGEPLRGVPGCCYSSLPRSYKAPYTCGGDSDQYVLMSSPVGRILEEERLEPQATPGPTQAASAFGAGPTQPPHPVVPSPVRPSGGRPEGFLGQRGRAVRPTRLSLEGLPSLPSMHEYPLPPEPKSPGEYINIDFGEPGARLSPPAPPLLASAASSSSLLSASSPALSLGSGTPGTSSDSRQRSPLSDYMNLDFSSPKSPKPGAPSGHPVGSLDGLLSPEASSPYPPLPPRPSASPSSSLQPPPPPPAPGELYRLPPASAVATAQGPGAASSLSSDTGDNGDYTEMAFGVAATPPQPIAAPPKPEAARVASPTSGVKRLSLMEQVSGVEAFLQASQPPDPHRGAKVIRADPQGGRRRHSSETFSSTTTVTPVSPSFAHNPKRHNSASVENVSLRKSSEGGVGVGPGGGDEPPTSPRQLQPAPPLAPQGRPWTPGQPGGLVGCPGSGGSPMRRETSAGFQNGLKYIAIDVREEPGLPPQPQPPPPPLPQPGDKSSWGRTRSLGGLISAVGVGSTRGGCGGPGPGAPAPCPTTYAQH

SEQ ID NO: 677 - DNA, 47 bp, Artificial Sequence
  Synthesized Oligonucleotide.
aagcagtggtaacaacgcagagtgcggccgatttttttttttttttr

SEQ ID NO: 678 - DNA, 30 bp, Artificial Sequence
  DNA/RNA hybrid primer.
aagcagtggtaacaacgcagagtcgacggg

SEQ ID NO: 679 - DNA, 27 bp, Artificial Sequence
  Synthesized Oligonucleotide.
aagcagtggtaacaacgcagagtcgac

SEQ ID NO: 680 - DNA, 22 bp, Artificial Sequence
  Synthesized Oligonucleotide.
gctgtgtccagatgttggaatg

SEQ ID NO: 681 - DNA, 22 bp, Artificial Sequence
  Synthesized Oligonucleotide.
caatgcaaatgtgaccatgatg

SEQ ID NO: 682 - DNA, 23 bp, Artificial Sequence
  Synthesized Oligonucleotide.
ggctctcctcatgctgtttagtg

SEQ ID NO: 683 - DNA, 23 bp, Artificial Sequence
  Synthesized Oligonucleotide.
gtgggaagcgaggtaagtacaag

SEQ ID NO: 684 - DNA, 21 bp, Artificial Sequence
  Synthesized Oligonucleotide.
cgctccttcagggctaatgat

SEQ ID NO: 685 - DNA, 22 bp, Artificial Sequence
  Synthesized Oligonucleotide.
gctgtgtggctaggaggatgag

SEQ ID NO: 686 - DNA, 25 bp, Artificial Sequence
  Synthesized Oligonucleotide.
gtcccttagcttgtacctcgtaaca

SEQ ID NO: 687 - DNA, 20 bp, Artificial Sequence
  Synthesized Oligonucleotide.
tggccttgacatgactgcaa

SEQ ID NO: 688 - DNA, 19 bp, Artificial Sequence
  Synthesized Oligonucleotide.
ccctgccaatccagcaatt

SEQ ID NO: 689 - DNA, 23 bp, Artificial Sequence
  Synthesized Oligonucleotide.
gccacacttgcacgtatttcttc

SEQ ID NO: 690 - DNA, 21 bp, Artificial Sequence
  Synthesized Oligonucleotide.
ccagcaggaggtagcactcaa

SEQ ID NO: 691 - DNA, 22 bp, Artificial Sequence
  Synthesized Oligonucleotide.
gctgattcggctgtctaccatt

SEQ ID NO: 692 - DNA, 20 bp, Artificial Sequence
  Synthesized Oligonucleotide.
cgctcagctttgatggaaca

SEQ ID NO: 693 - DNA, 21 bp, Artificial Sequence
  Synthesized Oligonucleotide.
gtccaattgtcgctgacgaat

SEQ ID NO: 694 - DNA, 22 bp, Artificial Sequence
  Synthesized Oligonucleotide.
ggcgtatcggagacgagtttaa

SEQ ID NO: 695 - DNA, 20 bp, Artificial Sequence
  Synthesized Oligonucleotide.
ggtcttcggctgcttggtaa

SEQ ID NO: 696 - DNA, 21 bp, Artificial Sequence
  Synthesized Oligonucleotide.
gccatgccagtgatgttcttc

SEQ ID NO: 697 - DNA, 21 bp, Artificial Sequence
  Synthesized Oligonucleotide.
cacggctcacaacaatgacaa

SEQ ID NO: 698 - DNA, 25 bp, Artificial Sequence
  Synthesized Oligonucleotide.
cactgacaacgttatgtgtggtctt

SEQ ID NO: 699 - DNA, 24 bp, Artificial Sequence
  Synthesized Oligonucleotide.
cgaatagcagcaccacatttatga

SEQ ID NO: 700 - DNA, 24 bp, Artificial Sequence
  Synthesized Oligonucleotide.
ctaggtgtggtggtctgtgcttat

SEQ ID NO: 701 - DNA, 24 bp, Artificial Sequence
  Synthesized Oligonucleotide.
cctcccaacttatcctccagagta

SEQ ID NO: 702 - DNA, 20 bp, Artificial Sequence
  Synthesized Oligonucleotide.
ggcctgacatggaaggtgaa

SEQ ID NO: 703 - DNA, 23 bp, Artificial Sequence
  Synthesized Oligonucleotide.
cccatttagaggatgtggctgta

SEQ ID NO: 704 - DNA, 23 bp, Artificial Sequence
  Synthesized Oligonucleotide.
ccgatgacagtaagcgtctgatt

SEQ ID NO: 705 - DNA, 22 bp, Artificial Sequence
  Synthesized Oligonucleotide.
cacggtcctgacactcagacat

SEQ ID NO: 706 - DNA, 20 bp, Artificial Sequence
  Synthesized Oligonucleotide.
ggtctggtgtgccttgtcaa

SEQ ID NO: 707 - DNA, 21 bp, Artificial Sequence
  Synthesized Oligonucleotide.
ccagtagttcccagcctccat

SEQ ID NO: 708 - DNA, 22 bp, Artificial Sequence
  Synthesized Oligonucleotide.
ccagccagtacaaggccaatat

SEQ ID NO: 709 - DNA, 23 bp, Artificial Sequence
  Synthesized Oligonucleotide.
cctccgttgggacactaagaaac

SEQ ID NO: 710 - DNA, 23 bp, Artificial Sequence
  Synthesized Oligonucleotide.
ccatctcttggtttggtcacatc

SEQ ID NO: 711 - DNA, 25 bp, Artificial Sequence
  Synthesized Oligonucleotide.
cgcagacactagcctagaacctatt

SEQ ID NO: 712 - DNA, 23 bp, Artificial Sequence
  Synthesized Oligonucleotide.
ccatatgcaagggatgcagttat

SEQ ID NO: 713 - DNA, 23 bp, Artificial Sequence
  Synthesized Oligonucleotide.
cgtcagttgttcctggagtgttt

SEQ ID NO: 714 - DNA, 22 bp, Artificial Sequence
  Synthesized Oligonucleotide.
gcctcctctgtctcacccttaa

SEQ ID NO: 715 - DNA, 24 bp, Artificial Sequence
  Synthesized Oligonucleotide.
gggtggatggtataggaagattca

SEQ ID NO: 716 - DNA, 23 bp, Artificial Sequence
  Synthesized Oligonucleotide.
cagtgtagcccattcttgatcca

SEQ ID NO: 717 - DNA, 21 bp, Artificial Sequence
  Synthesized Oligonucleotide.
gctgcctttgacatccagaga

SEQ ID NO: 718 - DNA, 25 bp, Artificial Sequence
  Synthesized Oligonucleotide.
ccatcaggtggattatacctttgac

SEQ ID NO: 719 - DNA, 22 bp, Artificial Sequence
  Synthesized Oligonucleotide.
gaatgatttggtgcagcatctc

SEQ ID NO: 720 - DNA, 25 bp, Artificial Sequence
  Synthesized Oligonucleotide.
ccttggattcttggcttagagtaga

SEQ ID NO: 721 - DNA, 21 bp, Artificial Sequence
  Synthesized Oligonucleotide.
tggaagggatgcttgttcttg

SEQ ID NO: 722 - DNA, 23 bp, Artificial Sequence
  Synthesized Oligonucleotide.
ccatctgtactccagcaaagtca

SEQ ID NO: 723 - DNA, 22 bp, Artificial Sequence
  Synthesized Oligonucleotide.
actgatgaacacgttggcagtt

SEQ ID NO: 724 - DNA, 20 bp, Artificial Sequence
  Synthesized Oligonucleotide.
cacacgagcgatgacgaatg

SEQ ID NO: 725 - DNA, 21 bp, Artificial Sequence
  Synthesized Oligonucleotide.
cccacgtagtcaaacttggca

SEQ ID NO: 726 - DNA, 22 bp, Artificial Sequence
  Synthesized Oligonucleotide.
ctggtgaccggataaagcaagt

SEQ ID NO: 727 - DNA, 22 bp, Artificial Sequence
  Synthesized Oligonucleotide.
cagttcgccatgctgttacaga

SEQ ID NO: 728 - DNA, 24 bp, Artificial Sequence
  Synthesized Oligonucleotide.
gaagatgaactcgtcgacttctca

SEQ ID NO: 729 - DNA, 23 bp, Artificial Sequence
  Synthesized Oligonucleotide.
ggaatccatcgtcactgctatca

SEQ ID NO: 730 - DNA, 24 bp, Artificial Sequence
  Synthesized Oligonucleotide.
cctccgactactttctccttcaag

SEQ ID NO: 731 - DNA, 21 bp, Artificial Sequence
  Synthesized Oligonucleotide.
cccagtgagtcaagcacatca

SEQ ID NO: 732 - DNA, 21 bp, Artificial Sequence
  Synthesized Oligonucleotide.
gtgaacaccaccgggtatcaa

SEQ ID NO: 733 - DNA, 24 bp, Artificial Sequence
  Synthesized Oligonucleotide.
ggctccataggaaagtaacagctt

SEQ ID NO: 734 - DNA, 22 bp, Artificial Sequence
  Synthesized Oligonucleotide.
ggaaggtggatgaggctacatt

SEQ ID NO: 735 - DNA, 21 bp, Artificial Sequence
  Synthesized Oligonucleotide.
tgcttgctgctgctactgtgt

SEQ ID NO: 736 - DNA, 23 bp, Artificial Sequence
  Synthesized Oligonucleotide.
gctgcatgtcttctgaatagcaa

SEQ ID NO: 737 - DNA, 25 bp, Artificial Sequence
  Synthesized Oligonucleotide.
tcctacggcatactgatcctagttt

SEQ ID NO: 738 - DNA, 20 bp, Artificial Sequence
  Synthesized Oligonucleotide.
atgaggcttggatcagcttt

SEQ ID NO: 739 - DNA, 20 bp, Artificial Sequence
  Synthesized Oligonucleotide.
cctgaagcctgacattccat

SEQ ID NO: 740 - DNA, 21 bp, Artificial Sequence
  Synthesized Oligonucleotide.
actgcagccgattcattaatg

SEQ ID NO: 741 - DNA, 48 bp, Artificial Sequence
  Synthesized Oligonucleotide.
gaattaatacgactcactatagggagatatcatacacatacgatttag

SEQ ID NO: 742 - DNA, 48 bp, Artificial Sequence
  Synthesized Oligonucleotide.
gaattaatacgactcactatagggagacatgattacgccaagctcgaa

SEQ ID NO: 743 - DNA, 21 bp, Artificial Sequence
  Synthesized Oligonucleotide.
tgtaaaacgacggccagtgaa

SEQ ID NO: 744 - DNA, 63 bp, Artificial Sequence
  Synthesized Oligonucleotide.
ggccagtgaattgtaatacgactcactatagggaggcggtttttttttttttttttttttttt

SEQ ID NO: 745 - DNA, 18 bp, Artificial Sequence
  Synthesized Oligonucleotide.
tgtaaaacgacggccagt

SEQ ID NO: 746 - DNA, 18 bp, Artificial Sequence
  Synthesized Oligonucleotide.
caggaaacagctatgacc

SEQ ID NO: 747 - DNA, 2893 bp, Homo sapiens
gtacctttgtccttggactttggtgatgtggtttgaccccagctagagagtgaggggaacaacagcaaaaggcaggacaaagactgactcgtgagaggaggcccaggaacaggggggcatcgtgaatgaggaggacgtgggggcccaagaaagtgagctcttgcgcactcagtcaccagcccccttctggggtccaagctgtgtccccttctctaaagaggtaagccctgagtcatgggaagatggaaaccggggctgatgagacaggatgttttttaagcaccgtggtgtcttgttgacttgcacatgcacgggggtcttgggtaaccacagggctcagggtatttgcaggaacagttcaagtgctcacttgtcttggggctgtttatggggaagtggtttccacagtgagaggacgtgagatattgttgtcaccccggaccacacttagctacttccttctcactaaagctctgtagtcatattttccctggcagagcagaaacttctatgttatcccacagctgttctaacggtgtagacttgacttatgcaatgatgccaggagtcctgagcagcacagcccaacttcaatcacacacagatggacagagctgtattagcaaagcctgagctactgagcgatgagagtacagccaggctttcagacatctgttcattcaagagagatatgcgctaagccaaggacctaaagatgtgtttaatatgggtgctaatatgcataaggaaccttgaaataaatgttcttagcctttggccaagagggtccatgtctaggaatctattctccatagaaataaattcaaatatggaaaaaatgaacaatgcataagtgtatttggtccccagcatatttatagcaacttaaaattggacccaatttaaatgcctatgatatggaaatggctaagaaaattatgggatcttcccttgattggctattaggcagcctttacaaacaatgcagtgacatgagaaatgcttatgttatggtaagcttaaaaaactcaagatgcaaatcagcttattttaatcaggagccacctagcatttgggatgtggtcaatcccacataatgtatttttgtgggtgcagttcccaggaaagaagaggaataaaaacggcaagtatgaagtgtctccttcacttgcagtctccttgtctacccctttgtccatccactatgaaaggactcccttctgttccttaatatggacaatttctattgaggactcattgttctaagaattgtctcatctcctcctgcatcctcagtgcccgatctttggcttctatgaaggaaggtgggtagtgcttatggcagggccagttctacctttctcagtatgttctggcctgggtatgtagccccattttctagtggttaccttgacatcatgaagagtttatgtctcttttgccctagatttgggcaatagtcattcattgggcaacaggaaataacacaagtcagcatctcattaaaaataaagtcattcaggaaagtggacgactaatagtttctaatctagagagcataggagaagaaatgtttaccacacacaaagtattagtgccttttatatcacgaagacaaaaataacaggaaaaagacaaacacattatagtgaaaacttgtttttcctaaccagcatctattctgcatgtttcctgatgcccgaaactcacatttcctcaggaaaatctcccttctgcaccattctcaggctttaagtttatgtaaaattcagtaaacccaaagattcaagttatgtgccttgattaacttaagcaaatcaatgaaacccatccccataaccacagcgacaggttaggaaattcggttcctaagtcagtcacatccgaaagggcctagtgatgtttttttccagtgggatcacagactcactcttccttgcagaaaatgaacaaaggattcatgtaacactggcaggtactggcagccacccagggcctctcacaggaaagggagatcagaaagagaagcaaagaggactcatgagataccatagggctgctgcgtccagccttgcctggagctagggccacctcgatgccctatagtcttggagccacaacgtgcatttactcaaagcctctttgagtttggtttgcttgtttgctttctgcctggaaactgccagcatcctgagagatacgagatctgcatctgtgcagagacacagggtttgttaaaagtcacaggccctgactgaagtgtggaactggctgaaatgagaaagtggtaatttggggaggaccttgtgaaatggaaggagttttaaaccttacatgcatcagaattacctggagccttgtgaaaacacaggttgctgggccctagtccattaagaaaggaagtggggcttagaatgttcatttctcccatgttcccaggtgatattcaccatgctgtcctgtctggacactaccttttgccatacccattacaaggtattgcacgtgctggttgaactatggtctgtcttattttggtgctaaaagcctgtgccaaataccaacgctgcagcattaaggaatgtgatagaaaagattctgaatataggccaggcgcagtggctcacgcctgtaatcccagcactttgggaggccgaggcaggcagatcacgaggtcaggagatcaagaccatcctggctaacatggtgaaaccccgtctctactaaaaatacaaaaaattagccgggcgtagtggtgggcacctgtagtcccagctacttgggaggctgaggcaggagaatggcgtgaacctgggaggcggaacttgcactgggctgagatcgcgctactgcactccactccagcctgggcgacagagcaagacttcgtctc

SEQ ID NO: 748 - DNA, 2396 bp, Homo sapiens
ggaagttgagcggcggcaagaaataatggcggcagctacgggggatcctggactctctaaactgcagtttgccccttttagtagtgccttggatgttgggttttggcatgagttgacccagaagaagctgaacgagtatcggctggatgaagctcccaaggacattaagggttattactacaatggtgactctgctgggctgccagctcgcttaacattggagttcagtgcttttgacatgagtgctcccaccccagcccgttgctgcccagctattggaacactgtataacaccaacacactcgagtctttcaagactgcagataagaagctccttttggaacaagcagcaaatgagatatgggaatccataaaatcaggcactgctcttgaaaaccctgtactcctcaacaagttcctcctcttgacatttgcagatctaaagaagtaccacttctactattggttttgctatcctgccctctgtcttccagagagtttacctctcattcaggggccagtgggtttggatcaaaggttttcactaaaacagattgaagcactagagtgtgcatatgataatctttgtcaaacagaaggagtcacagctcttccttacttcttaatcaagtatgatgagaacatggtgctggtttccttgcttaaacactacagtgatttcttccaaggtcaaaggacgaagataacaattggtgtatatgatccctgtaacttagcccagtaccctggatggcctttgaggaattttttggtcctagcagcccacagatggagtagcagtttccagtctgttgaagttgtttgcttccgtgaccgtaccatgcagggggcgagagacgttgcccacagcatcatcttcgaagtgaagcttccagaaatggcatttagcccagattgtcctaaagcagttggatgggaaaagaaccagaaaggaggcatgggaccaaggatggtgaacctcagtgaatgtatggaccctaaaaggttagctgagtcatcagtggatctaaatctcaaactgatgtgttggagattggttcctactttagacttggacaaggttgtgtctgtcaaatgtctgctgcttggagccggcaccttgggttgcaatgtagctaggacgttgatgggttggggcgtgagacacatcacatttgtggacaatgccaagatctcctactccaatcctgtgaggcagcctctctatgagtttgaagattgcctagggggtggtaagcccaaggctctggcagcagcggaccggctccagaaaatattccccggtgtgaatgccagaggattcaacatgagcatacctatgcctgggcatccagtgaacttctccagtgtcactctggagcaagcccgcagagatgtggagcaactggagcagctcatcgaaagccatgatgtcgtcttcctattgatggacaccagggagagccggtggcttcctgccgtcattgctgcaagcaagagaaagctggtcatcaatgctgctttgggatttgacacatttgttgtcatgagacatggtctgaagaaaccaaagcagcaaggagctggggacttgtgtccaaaccaccctgtggcatctgctgacctcctgggctcatcgctttttgccaacatccctggttacaagcttggctgctacttctgcaatgatgtggtggccccaggagattcaaccagagaccggaccttggaccagcagtgcactgtgagtcgtccaggactggccgtgattgcaggagccctggccgtggaattgatggtatctgttttgcagcatccagaagggggctatgccattgccagcagcagtgacgatcggatgaatgagcctccaacctctcttgggcttgtgcctcaccagatccggggatttctttcacggtttgataatgtccttcccgtcagcctggcatttgacaaatgtacagcttgttcttccaaagttcttgatcaatatgaacgagaaggatttaacttcctagccaaggtgtttaattcttcacattccttcttagaagacttgactggtcttacattgctgcatcaagaaacccaagctgctgagatctgggacatgagcgatgatgagaccatctgagatggccccgctgtggggctgacttctccctggccgcctgctgaggagctctccatcgccagagcaggactgctgaccccaggcctggtgattctgggcccctcctccataccccgaggtctgggattcccccctctgctgcccaggagtggccagtgttcggcgttgctcgggattcaagataccaccagttcagagctaaataataaccttggccttggccttgctattgacctgggaaaaaaaaaaaaaaaaaaaa

SEQ ID NO: 749 - protein, 703 aa, Homo sapiens
MAAATGDPGLSKLQFAPFSSALDVGFWHELTQKKLNEYRLDEAPKDIKGYYYNGDSAGLPARLTLEFSAFDMSAPTPARCCPAIGTLYNTNTLESFKTADKKLLLEQAANEIWESIKSGTALENPVLLNKFLLLTFADLKKYHFYYWFCYPALCLPESLPLIQGPVGLDQRFSLKQIEALECAYDNLCQTEGVTALPYFLIKYDENMVLVSLLKHYSDFFQGQRTKITIGVYDPCNLAQYPGWPLRNFLVLAAHRWSSSFQSVEVVCFRDRTMQGARDVAHSIIFEVKLPEMAFSPDCPKAVGWEKNQKGGMGPRMVNLSECMDPKRLAESSVDLNLKLMCWRLVPTLDLDKVVSVKCLLLGAGTLGCNVARTLMGWGVRHITFVDNAKISYSNPVRQPLYEFEDCLGGGKPKALAAADRLQKIFPGVNARGFNMSIPMPGHPVNFSSVTLEQARRDVEQLEQLIESHDVVFLLMDTRESRWLPAVIAASKRKLVINAALGFDTFVVMRHGLKKPKQQGAGDLCPNHPVASADLLGSSLFANIPGYKLGCYFCNDVVAPGDSTRDRTLDQQCTVSRPGLAVIAGALAVELMVSVLQHPEGGYAIASSSDDRMNEPPTSLGLVPHQIRGFLSRFDNVLPVSLAFDKCTACSSKVLDQYEREGFNFLAKVFNSSHSFLEDLTGLTLLHQETQAAEIWDMSDDETI

SEQ ID NO: 750 - DNA, 1066 bp, Homo sapiens
ggcagttagtcggctgcaatggcgccggtgaggcggtccgcgaagtggcggcctggtggtattgaggcgcgtggtgaaggggtttccactgtcgggtacaggaataagaatgtgagacagaagacatggcggcctaaccacccgcaagccttcgtggggagcgttcgcgagggacaaggctttgcttttcgaagaaaactgaaaatacagcaaagttacaagaaattgctacggaaggaaaagaaggctcaaacgtcactggaatctcaattcacagatcgatacccagataatctgaaacatctctatttagctgaagaggaaagacataggaagcaagcaagaaaagtcgaccatcctttgtcagaacaagttcaccagccgttgcttgaagaacagtgtagcattgacgagcctttatttgaagatcagtgtagctttgaccagcctcagccagaagaacaatgtattaaaacagtaaactcctttacaatttcaaagaaaaataaaaagaaaacatcaaatcaaaaagcacaagaagaatatgaacagatacaagccaaacgtgctgctaagaaacaagaattcgagaggagaaaacaggagagagaagaagcccaaaggcagtacaaaaagaagaaaatggaagtgtttaaaatactgaacaaaaagactaaaaagggccaaccaaacttgaatgtacaaatggagtaccttcttcaaaaaatacaagaaaaatgttaaacattttgttcctacaggttaaaatatctgctgcctattaggttcttctgtgacatgtgcctcccagcagtgaactaaatttgtcgacataaactggattgctaaactatgctaaatataagatgttcacatatttttattatggtaaaaaattttctaaatatgttctacatgtttcttatttatttgcctctgaaggaaggttggcctgaagaactgaaagaacctcttattttgcaagacaggcccaagcatgtaatacttttgtaccatatgagatttatatgaaataaattttttaaaaataaggaaaaaaaaaaaa

SEQ ID NO: 751 - protein, 241 aa, Homo sapiens
MAPVRRSAKWRPGGIEARGEGVSTVGYRNKNVRQKTWRPNHPQAFVGSVREGQGFAFRRKLKIQQSYKKLLRKEKKAQTSLESQFTDRYPDNLKHLYLAEEERHRKQARKVDHPLSEQVHQPLLEEQCSIDEPLFEDQCSFDQPQPEEQCIKTVNSFTISKKNKKKTSNQKAQEEYEQIQAKRAAKKQEFERRKQEREEAQRQYKKKKMEVFKILNKKTKKGQPNLNVQMEYLLQKIQEKC

SEQ ID NO: 752 - DNA, 3435 bp, Homo sapiens
tcaatgcactgttcaaggatgtttgagagattttctgtcttgcctgaatacaaaacactgtagggaacctcttgtgcttgactttgcacacacacgggatcttcagggtgggtacatttaaaactgacaagtattgccaaattgccccccaacgtagtttttacaccccacctactactctcagtgaaaaatcaggccctttttattttaagggctaaattgctaatccctgtgtgaaaatgggtgttaacaaaataaaaaataaggaaaatatgcaggcttacccaattttgttatctatacattttacagtctctaatacttagcatagctcctttgggtgtctgcccaccacccttctttctgaacgtggggttccctgggctttccttgtttgacttcagacctggatctaatagggatctggaggtagaatcaagacgaatgttccctttggccttaggtgagtcctttgcatctctgaggccctgttgatgacatccagttctctagacctctgcccaaaccagagcaatccctcctcaaatatgctaagcagaaatgcagacaatataagacacactatatttatattttaggagtttacattaccttcccttctgtttggaaaccaacatctctcaaaattaggtatagttaacacagaataccccaaaataccaccattcttcataattccatttccttatttctggattctttcaagggtaaaaaccttgtttcattcatctttggggcagcatttgcctagtatgtggtaggcgcccagtagattttggataaactgacctgattttctgttaatattccaactggattatttctttctcctcttacagaatgaagatattcaaatgttattttaaacataccctacagcagaaagttttcatcctgtttttaaccctatggctgctctctttgttaaagcttctaaatgtgagacgactctttccgcaaaaagacatttacttggttgagtactccctaagtacctcgccttttgtaagaaacagatacactcatgttaaggatgaagtcaggtatgaagttaactgttcgggtatctatgaacaggagcctttggaaattggaaagagtctggaaataagaagaagggacatcattgacttggaggatgatgatgttgtggcaatgaccagtgattgtgacatttatcagactctaagaggttatgctcaaaagcttgtctcaaaggaggagaaaagcttcccaatagcctattctttggttgtccacaaagatgcaattatggttgaaaggcttatccatgctatatacaaccagcacaatatttactgcatccattatgatcgtaaggcacctgataccttcaaagttgccatgaacaatttagctaagtgcttctccaatattttcattgcttccaaattagaggctgtggaatatgcccacatttccagactccaggctgatttaaattgcttgtcggaccttctgaagtcttcaatccagtggaaatatgttatcaacttgtgtgggcaagattttcccctgaagtcaaattttgaattggtgtcagagttgaaaaaactcaatggagcaaatatgttggagacggtgaaacccccaaacagtaaattggaaagattcacttaccatcatgaacttagacgggtgccttatgaatatgtgaagctaccaataaggacaaacatctccaaggaagcacccccccataacattcagatatttgttggcagtgcttattttgttttaagtcaagcatttgttaaatatattttcaacaactccatcgttcaagacttttttgcctggtctaaagacacatactctcctgatgagcacttttgggctaccttgattcgggttccaggaatacctggggagatttccagatcagcccaggatgtgtctgatctgcagagtaagactcgccttgtcaagtggaattactatgaaggctttttctatcccagttgtactggatctcaccttcgaagcgtgtgtatttatggagctgcagaattaaggtggcttatcaaagatggacattggtttgctaataaatttgattctaaggtggaccctatcttgattaaatgcttggcagaaaagcttgaagaacagcagagagactggatcactttgccctcagaaaagttatttatggatagaaatctcactaccacatcatgatagtaaaatcaggatggaaataagagggtgcctgataaatggagtcagtgtggaattgaataccatactatgcccaatactgtttaaactcagtcctcccatattttaaaaggtgtccaaaattccatacacaagggaaagtgatctagcctttgatgttattagcctgcagttggctaggtttttttaatatttgtttttgcttgtaatctcactgagccaaatcagagatcttaaacattcagtcagtcatcaaacattattgagcacctaactatatgacaggcacttttttagagactgcggcttatcctcatcatagcaacctcggtatctttaagttctccacataacagtcaggattctactgaagaagcttttgaagtttgtggtaatcgtctgatcatataaaccacccatttcagagtagtgtttaagtactgtgaccaacactccacttgtctcttaactcagctttcaagacattccttaaccatcagagcagaggaggaaagactcactacctcagaaaaatctcaaagaatagtccaatttcctgcttgccaaagcataatctgccttttggtgcattacttggtcaattcagggttgaggagactgttggggggcatttataatgtatgaaagttaaggaagggggtgaggatgtgggttgggacaggtagtacctaaagaggagcgaagggatttatacaacatttttatcatgttacaaaacagtatcatgaatggcctcctttttagttcaactgtttctttaaaatgcatttactgattaaaaataagaactgaccaatagctccaagtgtcacacaccagaacattaagcctaagtcctcaattcataagttatcattctagacaagtttctttacaatggaatactttctatggaatcattataattctgttgtgtggaactatcaagctaagagtcactaaactttcttgaaaaggttgtgtgaaatatgacagctttctaaattaatttgtatagtcatttaaaattttttcttctctggcaactgtccaactggaatccagatttaaggtgataaaagctctaagtttcttgcagtctttttctcagcttagttccagagagaaaaaagctaattttcctaaggacacagcaagaatattcattaaggatattttctaaaacccacacttgagaaaaccacccaatga

SEQ ID NO: 753 - protein, 453 aa, Homo sapiens
MKIFKCYFKHTLQQKVFILFLTLWLLSLLKLLNVRRLFPQKDIYLVEYSLSTSPFVRNRYTHVKDEVRYEVNCSGIYEQEPLEIGKSLEIRRRDIIDLEDDDVVAMTSDCDIYQTLRGYAQKLVSKEEKSFPIAYSLVVHKDAIMVERLIHAIYNQHNIYCIHYDRKAPDTFKVAMNNLAKCFSNIFIASKLEAVEYAHISRLQADLNCLSDLLKSSIQWKYVINLCGQDFPLKSNFELVSELKKLNGANMLETVKPPNSKLERFTYHHELRRVPYEYVKLPIRTNISKEAPPHNIQIFVGSAYFVLSQAFVKYIFNNSIVQDFFAWSKDTYSPDEHFWATLIRVPGIPGEISRSAQDVSDLQSKTRLVKWNYYEGFFYPSCTGSHLRSVCIYGAAELRWLIKDGHWFANKFDSKVDPILIKCLAEKLEEQQRDWITLPSEKLFMDRNLTTTS

SEQ ID NO: 754 - DNA, 696 bp, Homo sapiens
agtgcgaatcatgggaggcggctggtggtgggctcgggccgctcgccttgcccgtcttcgcttccggaggtcgctactgccgcctcagcggccccggagcgggggcgcccgggggtccttcgcccccggccacggtccccgcgccggggcttcgccgcccccagtgtccgagctggatcgtgcggacgcctggctcctccgaaaagcgcacgagacagccttcctctcctggttccgcaatggcctcctggcatcgggcatcggggtcatctccttcatgcagagtgacatgggtcgggaagcagcatatggcttcttcctgctgggcggcctgtgcgtggtgtggggcagcgcctcgtacgccgtgggcctggcggcgctgcgaggacccatgcagctgacgctggggggcgcggccgtgggcgcgggcgccgtgctggccgccagcctgctctgggcgtgcgccgtgggcctctacatggggcagctggagctggacgtggagctggtgcccgaggacgacgggacggcctccgcggaaggccctgatgaggcgggtcggccgccacccgagtgagcgacacggccgtggggcctggcaggcgctggacagcgcccgaggactgggacattaaacctgacctcccctcctccaaaaaaaaaaaaaaaaaaaaaaaaaaaaaaaaaaaaaaaaaa

SEQ ID NO: 755 - protein, 188 aa, Homo sapiens
MGGGWWWARAARLARLRFRRSLLPPQRPRSGGARGSFAPGHGPRAGASPPPVSELDRADAWLLRKAHETAFLSWFRNGLLASGIGVISFMQSDMGREAAYGFFLLGGLCVVWGSASYAVGLAALRGPMQLTLGGAAVGAGAVLAASLLWACAVGLYMGQLELDVELVPEDDGTASAEGPDEAGRPPPE

SEQ ID NO: 756 - DNA, 2805 bp, Homo sapiens
gaatcttcctagttctagtggttggacaagtctttaactccatagcctagctccagctaggttcatgagctggccctactgctctctcctttccccttttcctcttatcccattgcattagtctggattcttgcttacagataaccaaaaccttagtcaatctgatttaagcaaaaaccagaattgataggctcacataactgaaattccagggtagaccctaaggccgggctggatgcagggactcagtcatctcactcgggctaggtctctctcaatgcctagtccctatttcatctgagttggcttccctctcaggtgggctttttctcatggagatcctcagcagcccatggaaggagagtctgtttttcccatcatcttgtacaagtccccaggttgagtctcattggcctgctggccccatgcccatccctgaacaatactgcaattggtcacctgcagtcacatgccctgtgactgcaggaaggtggggatgggctagttacccaaaggaaagtccaggtgctgtgcccagaagggagaatggatgtggggcagagcaaaccgtagatgtctaccttacccagccagacaagactgcatgtaagaaccaggcttacgggccagcccctctctgcaggcccacactgtacactcctgaaatgccattccttagtctggccaaccctcattcacccttccaatctcagcttatatagatggctccccatgctgcctaggaactaccccacattgcactcccatctctgcatgctccctggaggcagggaggaggttttgtccacctctatatccccagtctctggcccacatcagtgttttcagtaagtgttagtgtgttagtggcatcacttccaactgatatacctccttggtactacccttcccagacttaggaggccatctttggacaatggtgtatggtgggaaagtgctcagcaaggaggctctccttccatcctaggaccctgggccagttgtttcacctccggtcctcataccccagactgtgctgatacggttttccttcctaccccacaagataggatcaaatgagatgctgtgtggaaagccctctgacatacacagatatgaggggttgtttggattaggggtggaggcagcaggatgagcagaaaggaaactgcacagtgtccccaggaggccatggttaggttatctccaactatgagatacaggagacagaaagtatccaaccaggacaatgtgaccaaactaaagtgagaaaaatgtaggctttggggcagtgtaagtgggtatatcttctgtgaatagcaatttggcaaaatccattacatttcagagcaagcacattctttgacctgaaattccatgcccaggagtttatataagagagacagtgatgagcaaagatttatttgctgaagtgttacttaccatagcagaagattgaaaatgacccaaatgcacgtcctttggggataaataagttagagcatatctaaacaagaaaatattacgtaaaataaattggaggtctccacaaaaaaaaaaaaaaacccattttttttcagacaggatctcacaccgttgcccaggctggagggcagtgacgtgatcagagctcactgcagcttcaacaccccagggctcgagcagttgtcccacttcagcctcccaaatagctgggactacaggtctacaccaccactcccggctaattttttaatattttgtaatgacagggtctccatatgttgcccaggctggtctcgaactcctggcctcgagcagtcttcctgcctcgggctcccaacatgctggcattacaggtatgagccaccgcgcccagcccatctcacttctgaaaatgactcagtgccatgaacccttcatccctagtggcctttgggggtgggaggtcttcaaagtacagccgtctctttctacctaatgtgtgtctgcaacatcgaacttgttcatcataagtacgtattacttctgtaaccaggaaaagttacaagaagagggggccaggcacagtggctcatgcccgtaattctcacattttgggaggtcgaggcaggagtattgcttgagcccggaagttcgagaccagctttgggcaacacagtgagacctcatctctaaaaaaaagttcttttaattagctgggcatggtggtgtgctgcgtgcctgtggtcccagctacttggaaggctaaggtaggaggaggattcctttagcctggaggtcaaggctgcagtgagccatgttcatgacactgcactccagcctgggtgatagagtgagaacttgtctcaaaggaaagaaaaaaaaaataagaaaatgttgggttctcagcacttccagcccacccccatccatatacattccagcacattgttggggccatttgcaagctctgagatgagattctgcacaagtcagcagtgcagagactcccagggaaggcctgaggccgccaagagcaactctgcagggtctgctccaagaggcagaggtgggccccaccgtccttggcaaaatggagattggtctgagggttccatgaggcaggcttgcaggagcaagggagtgatagaaagccatgtgaggggacgagagggaggacaccctcccctgcagaagtcaggaaggtctttgagcttgttctgagaggaaaacccattctctgggtagaggaatgaagactcagaggagactggggttcgctttgtgtgatactgatatggttactgaaaggctagcccagtcccaggctacgtgaacagactt

SEQ ID NO: 757 - protein, 129 aa, Homo sapiens
MEILSSPWKESLFFPSSCTSPQVESHWPAGPMPIPEQYCNWSPAVTCPVTAGRWGWASYPKESPGAVPRRENGCGAEQTVDVYLTQPDKTACKNQAYGPAPLCRPTLYTPEMPFLSLANPHSPFQSQLI

SEQ ID NO: 758 - DNA, 3737 bp, Homo sapiens
ccaaccgtggtggctccttgcgttcctacatcctctcatctgagaatcagagagcataatcttcttacgggcccgtgatttattaacgtggcttaatctgaaggttctcagtcaaattctttgtgatctactgattgtgggggcatggcaaggtttgcttaaaggagcttggctggtttgggcccttgtagctgacagaaggtggccagggagaaggcagcacactgctcggagaatgaaggcgcttctgttgctggtcttgccttggctcagtcctgctaactacattgacaatgtgggcaacctgcacttcctgtattcagaactctgtaaaggtgccttccactacgggctgaccaaagataggaagaggcgctcacaagatggctgtccagacggctgtgcgagcctcacagccacggctccctccccagaggtttctgcagctgccaccatctccttaatgacagacgagcctggcctagacaaccctgcctacgtgtcctcggcagaggacgggcagccagcaatcagcccagtggactctggccggagcaaccgaactagggcacggccctttgagagatccactattagaagcagatcatttaaaaaaataaatcgagctttgagtgttcttcgaaggacaaagagcgggagtgcagttgccaaccatgccgaccagggcagggaaaattctgaaaacaccactgcccctgaagtctttccaaggttgtaccacctgattccagatggtgaaattaccagcatcaagatcaatcgagtagatcccagtgaaagcctctctattaggctggtgggaggtagcgaaaccccactggtccatatcattatccaacacatttatcgtgatggggtgatcgccagagacggccggctactgccaggagacatcattctaaaggtcaacgggatggacatcagcaatgtccctcacaactacgctgtgcgtctcctgcggcagccctgccaggtgctgtggctgactgtgatgcgtgaacagaagttccgcagcaggaacaatggacaggccccggatgcctacagaccccgagatgacagctttcatgtgattctcaacaaaagtagccccgaggagcagcttggaataaaactggtgcgcaaggtggatgagcctggggttttcatcttcaatgtgctggatggcggtgtggcatatcgacatggtcagcttgaggagaatgaccgtgtgttagccatcaatggacatgatcttcgatatggcagcccagaaagtgcggctcatctgattcaggccagtgaaagacgtgttcacctcgtcgtgtcccgccaggttcggcagcggagccctgacatctttcaggaagccggctggaacagcaatggcagctggtccccagggccaggggagaggagcaacactcccaagcccctccatcctacaattacttgtcatgagaaggtggtaaatatccaaaaagaccccggtgaatctctcggcatgaccgtcgcagggggagcatcacatagagaatgggatttgcctatctatgtcatcagtgttgagcccggaggagtcataagcagagatggaagaataaaaacaggtgacattttgttgaatgtggatggggtcgaactgacagaggtcagccggagtgaggcagtggcattattgaaaagaacatcatcctcgatagtactcaaagctttggaagtcaaagagtatgagccccaggaagactgcagcagcccagcagccctggactccaaccacaacatggccccacccagtgactggtccccatcctgggtcatgtggctggaattaccacggtgcttgtataactgtaaagatattgtattacgaagaaacacagctggaagtctgggcttctgcattgtaggaggttatgaagaatacaatggaaacaaaccttttttcatcaaatccattgttgaaggaacaccagcatacaatgatggaagaattagatgtggtgatattcttcttgctgtcaatggtagaagtacatcaggaatgatacatgcttgcttggcaagactgctgaaagaacttaaaggaagaattactctaactattgtttcttggcctggcacttttttatagaatcaatgatgggtcagaggaaaacagaaaaatcacaaataggctaagaagttgaaacactatatttatcttgtcagtttttatatttaaagaaagaatacattgtaaaaatgtcaggaaaagtatgatcatctaatgaaagccagttacacctcagaaaatatgattccaaaaaaattaaaactactagttttttttcagtgtggaggatttctcattactctacaacattgtttatattttttctattcaataaaaagccctaaaacaactaaaatgatttgtataccccactgaattcaagctgatttaaatttaaaatttggtatatgctgaagtctgccaagggtacattatggccatttttaatttacagctaaaatattttttaaaatgcattgctgagaaacgttgctttcatcaaacaagaataaatatttttcagaagttatagttgtcttttagtatgtgatactaattaagattacttttgtattatcactatttaaaagatcctagtaatttattctttcaaataccatgttatttgttaccatcaccgatgaatacctcctaggcttatccctaaaaatgctcgctcagagaattaattataaacttgttttgtttttagtaagaaatggctaaagctcttttttttccacaatcgttagtaactgtataaaaactcatgctgctccaccagtgggccttggaaaatgcatcaagaaggccaaaccagcttgaccctggctcacagacatggtcatgaggcgatttaaatttgtgccacaatgaagagtgtgtgtacacatgcctcctagaaactacactatgggtaattaatttatttcatagaggccacccagatgccttataggttttattaatttggatatgaaagtgtaccccatttggtttcaccaggaacccaaatttagaatattgaaaagccatcaaaaagttgtgatatcaaaaatgtatgagtctcttaatatactaagcaagagtgtcacagcagtaatgataaagactagttttaatctcaagccttagaggggccctttgttgccttttgtggtgcagcctcttaagagagtggtgtttgattaacaaaaaaactgtggcccaagtggaacccttgaccttttctcagataatctgtgtatgtacacagctaacacagctctttagattccctgttaagtgactcattcacattcctttcttggatataaagtcattgctgtctttttatttttgaaatagtacaagacaaagatttttaacttaacatgaaaaattcactcttttattttggaaaaaaagttaacttttcatactaacaaacagaacaagatttaaggtaaatttcttaaacattatccagaaaaataacaagatttatagtatctacttctggtactaatatacacaaaaggccaaaaccatgcctattctgcaggtgtagcttcggtgctctcctgttcaggggcaggctcactgcccgcttcttttccttctttgcttcttttagattttttgtgtttgtgtctcctgtgactatctccttcttcactttcatggcgacgtctactattac

SEQ ID NO: 759 - protein, 632 aa, Homo sapiens
MKALLLLVLPWLSPANYIDNVGNLHFLYSELCKGAFHYGLTKDRKRRSQDGCPDGCASLTATAPSPEVSAAATISLMTDEPGLDNPAYVSSAEDGQPAISPVDSGRSNRTRARPFERSTIRSRSFKKINRALSVLRRTKSGSAVANHADQGRENSENTTAPEVFPRLYHLIPDGEITSIKINRVDPSESLSIRLVGGSETPLVHIIIQHIYRDGVIARDGRLLPGDIILKVNGMDISNVPHNYAVRLLRQPCQVLWLTVMREQKFRSRNNGQAPDAYRPRDDSFHVILNKSSPEEQLGIKLVRKVDEPGVFIFNVLDGGVAYRHGQLEENDRVLAINGHDLRYGSPESAAHLIQASERRVHLVVSRQVRQRSPDIFQEAGWNSNGSWSPGPGERSNTPKPLHPTITCHEKVVNIQKDPGESLGMTVAGGASHREWDLPIYVISVEPGGVISRDGRIKTGDILLNVDGVELTEVSRSEAVALLKRTSSSIVLKALEVKEYEPQEDCSSPAALDSNHNMAPPSDWSPSWVMWLELPRCLYNCKDIVLRRNTAGSLGFCIVGGYEEYNGNKPFFIKSIVEGTPAYNDGRIRCGDILLAVNGRSTSGMIHACLARLLKELKGRITLTIVSWPGTFL

SEQ ID NO: 760 - DNA, 3614 bp, Homo sapiens
agcggagttgcgggcgcgtggctgctgaggttggcggcggtgccgcgcgcccgacgggccggtggttgcggggcctcccgcctcgacccgggctgggggcagccgtggcggccgccggggaccgcaaggggcggaggaaaggagggggccggtcccggcacgcagaggagcagccgaccatgccccgagacaacatggcctccttgatccaacggatcgcccgccaggcttgcctcaccttccggggcagctggggcggccgcggcgcttccgatcgcgacgcggcttctggcgcggaggcgccgatgcagccgggcttccccgagaacctgagcaagctgaagagcctcctgacccagctccgcgccgaggacttgaacatcgccccgcgcaaggccacactgcagccgctgccgcccaacctgccgccagtcacctacatgcacatctacgagacggacggcttcagcctgggcgtgttcctgctcaagagcggcacgtccatcccgctgcacgaccacccgggcatgcacggcatgctcaaggtgctgtacggcaccgtgcgcatcagctgcatggacaagctagacgcgggcggcgggcaacggccgcgggccttgccgcccgagcagcagttcgagccgccgctgcagccccgggagcgagaagccgtgcggccgggcgtgctgcgttcgcgggccgagtacaccgaggccagcggcccctgcatcctcacaccgcaccgggacaacctgcaccagatcgacgccgtggaagggcctgccgccttcctggacatcctggccccgccctacgacccggacgatggccgggactgccactattaccgggtgctggagccggtcaggcccaaggaggcctccagctcggcctgtgacctgcctcgagaggtgtggctcctggagaccccacaggccgatgacttctggtgcgagggagaaccctatccaggtcccaaggtcttcccttgaagccactggcgcccaggagcggtgggccgaagacgtgccctaccctaccacaagggctgtgtctctaccccctagcctgggcgttggatctactggaatgagcagcagccgcttcctcggcagccttgggaagcacgggcgactggacagcagccgccgggcacggttatgggggcggggtgggcggggaggctagattgtttcctggtactgtcactgccactggggctttgatttggaggaatggggcaggggactatctgaagcgcttccatcctaaagccataatgaaaatatcttcctctcttccccattctatacaaaatactaagtggttttcttgctcccactccctaccccttagttaaatagggtttattttccactcatgcccttatgcctttttttcttatagttttttaacttattgactgtgcatgacccagtggtttgaattgtttttagttcaagtcattggtaaaaactaggtttaaggagatgagctactgtttaaagtgagctggcctgcctaattaattccttgtgaaaactaaatgattttttcagtttggggatcattctcacaacataactatgcatgtagaggacgagatttattttctttcctccctttgcccagtagccacatctggtttactcaggcagcatctactaagaaattcagcacctgcatatctctgtgacatggtcacttagagcttatcttccctatgaatctccagatctgtgagtcgagcagatttcatgttgcagattcacctttaatgcaaagactgtattatcctcacatgactttttttcttgtcttactgtaccttaaaaggtgatagagtaattctgtattttctaacgggaagattcaaaggagctgaatgtgttatgcttccaaacaactgaatgtaaaacactcctagccagttgttgcattccctatatttatttacttccaatattttactgtaaaagtagggagaaatattatgttgatagttgtttcatattctctcaggaactttaatgttcccgactcgggtgattccagctgtgttgctggcagtgttgtctcaaccctctccctaaaatgactgagccctgggttcatctaatgtggttttccttaggaagagatagaaggcacagaagatcacagctagagaattgagaattaactatactactagccattttagggcaccaaaacttgggattaaacacttcctacttcccactcccaactcctgaaatgaagtcttgctatctgtgactagttttatttttgtgcttttaatagtccgagcagtcttaccttgtttacacatgtattgacaccatttgcttcaggccatggagcactgtttctccctttttactatttataggattccgttttttcacaagacttttaataaaaagaaattgtagaaataaacacattaaaatttgcccagctgtcgtctaagccctcttgattgacttgcccaagtggcaatagagttctaatatctataataaagggagatttgctattattagtggaatgttgaccccgtatgtagagaaacagtacgtgcctttgcctctttatgcacacagagacccagggtgagggagtatttgttcccagtttttaagatagtataaaaaagcaaatacttggtgagtgatttaaaaataaaaccaaaacaaaacacaaaaagatattccacaggacatgccactttattataaaacctgacacaggcatagtaccaagtatttcctgcattgttgctaaaattgttttattgtagctccacattctggtgtagtttaaaatgcctttgggggcagtttgaagcagttcttcatgccacttagtttgaaaataaaattctagatatgcaaatgattttcttagaaaacttcacaaaataaaagatcttgtttttttttccatagcacagtaatgaatgtggttatcaatcacatacttttttggattatattgtagcaaaaagttgattagcttaccaagattattaatagcaatgtatgtgttataatacaacttagtacattaaagctacgaaaactcatcctggctgtaggatagtaataaaggaagaattatgacttcattatgaaaaaaagaagttttaaagttttcaattacgagcaatttggaagaaaaaacctaaggtgcttttcaaaagagtaactgaaattgttgcaggccaaaacagcaatatgatatctcagatttagttcaataagaacagtgaaacttttggttcactaataaattctgagtaaattagtggtgaagacaaaatataacttgttttagtgagccactgaggaaagaatatgcttattacaaagacaaaatgtggtgcagaaactatcttgcacctgtgtgcataaactgttagtcgtgactgacttggtgtgttgctattgtgtttctatatactccgtccaatatagataatgttttaataacaactgtgggataaaagttatcttccccttggaaagactaatgagcacaatgatattaatcacttttatggtgaataataaatgcaataattgcctcatgggtgaaaaaaaaaaaaaaaa

SEQ ID NO: 761 - protein, 228 aa, Homo sapiens
MQPGFPENLSKLKSLLTQLRAEDLNIAPRKATLQPLPPNLPPVTYMHIYETDGFSLGVFLLKSGTSIPLHDHPGMHGMLKVLYGTVRISCMDKLDAGGGQRPRALPPEQQFEPPLQPREREAVRPGVLRSRAEYTEASGPCILTPHRDNLHQIDAVEGPAAFLDILAPPYDPDDGRDCHYYRVLEPVRPKEASSSACDLPREVWLLETPQADDFWCEGEPYPGPKVFP

SEQ ID NO: 762 - DNA, 1836 bp, Homo sapiens
ggcgctgggcggctgcggcgcgcggtgcgcggtgcgtagtctggagctatggtggtggtggcagccgcgccgaacccggccgacgggacccctaaagttctgcttctgtcggggcagcccgcctccgccgccggagccccggccggccaggccctgccgctcatggtgccagcccagagaggggccagcccggaggcagcgagcggggggctgccccaggcgcgcaagcgacagcgcctcacgcacctgagccccgaggagaaggcgctgaggaggaaactgaaaaacagagtagcagctcagactgccagagatcgaaagaaggctcgaatgagtgagctggaacagcaagtggtagatttagaagaagagaaccaaaaacttttgctagaaaatcagcttttacgagagaaaactcatggccttgtagttgagaaccaggagttaagacagcgcttggggatggatgccctggttgctgaagaggaggcggaagccaaggggaatgaagtgaggccagtggccgggtctgctgagtccgcagcactcagactacgtgcacctctgcagcaggtgcaggcccagttgtcacccctccagaacatctccccatggattctggcggtattgactcttcagattcagagtctgatatcctgttgggcattctggacaacttggacccagtcatgttcttcaaatgcccttccccagagcctgccagcctggaggagctcccagaggtctacccagaaggacccagttccttaccagcctccctttctctgtcagtggggacgtcatcagccaagctggaagccattaatgaactaattcgttttgaccacatatataccaagcccctagtcttagagataccctctgagacagagagccaagctaatgtggtagtgaaaatcgaggaagcacctctcagcccctcagagaatgatcaccctgaattcattgtctcagtgaaggaagaacctgtagaagatgacctcgttccggagctgggtatctcaaatctgctttcatccagccactgcccaaagccatcttcctgcctactggatgcttacagtgactgtggatacgggggttccctttccccattcagtgacatgtcctctctgcttggtgtaaaccattcttgggaggacacttttgccaatgaactctttccccagctgattagtgtctaaggaatgatccaatactgttgcccttttccttgactattacactgcctggaggatagcagagaagcctgtctgtacttcattcaaaaagccaaaatagagagtatacagtcctagagaattcctctatttgttcagatctcatagatgacccccaggtattgtcttttgacatccagcagtccaaggtattgagacatattactggaagtaagaaatattactataattgagaactacagcttttaagattgtacttttatcttaaaagggtggtagttttccctaaaatacttattatgtaagggtcattagacaaatgtcttgaagtagacatggaatttatgaatggttctttatcatttctcttccccctttttggcatcctggcttgcctccagttttaggtcctttagtttgcttctgtaagcaacgggaacacctgctgagggggctctttccctcatgtatacttcaagtaagatcaagaatcttttgtgaaattatagaaatttactatgtaaatgcttgatggaattttttcctgctagtgtagcttctgaaaggtgctttctccatttatttaaaactacccatgcaattaaaaggtacaatgcaaaaaaaaaaaaaaaaa

SEQ ID NO: 763 - protein, 261 aa, Homo sapiens
MVVVAAAPNPADGTPKVLLLSGQPASAAGAPAGQALPLMVPAQRGASPEAASGGLPQARKRQRLTHLSPEEKALRRKLKNRVAAQTARDRKKARMSELEQQVVDLEEENQKLLLENQLLREKTHGLVVENQELRQRLGMDALVAEEEAEAKGNEVRPVAGSAESAALRLRAPLQQVQAQLSPLQNISPWILAVLTLQIQSLISCWAFWTTWTQSCSSNALPQSLPAWRSSQRSTQKDPVPYQPPFLCQWGRHQPSWKPLMN

SEQ ID NO: 764 - DNA, 1049 bp, Homo sapiens
aaaacaacaggaagcagcttacaaactcggtgaacaactgagggaaccaaaccagagacgcgctgaacagagagaatcaggctcaaagcaagtggaagtgggcagagattccaccaggactggtgcaaggcgcagagccagccagatttgagaagaaggcaaaaagatgctggggagcagagctgtaatgctgctgttgctgctgccctggacagctcagggcagagctgtgcctgggggcagcagccctgcctggactcagtgccagcagctttcacagaagctctgcacactggcctggagtgcacatccactagtgggacacatggatctaagagaagagggagatgaagagactacaaatgatgttccccatatccagtgtggagatggctgtgacccccaaggactcagggacaacagtcagttctgcttgcaaaggatccaccagggtctgattttttatgagaagctgctaggatcggatattttcacaggggagccttctctgctccctgatagccctgtgggccagcttcatgcctccctactgggcctcagccaactcctgcagcctgagggtcaccactgggagactcagcagattccaagcctcagtcccagccagccatggcagcgtctccttctccgcttcaaaatccttcgcagcctccaggcctttgtggctgtagccgcccgggtctttgcccatggagcagcaaccctgagtccctaaaggcagcagctcaaggatggcactcagatctccatggcccagcaaggccaagataaatctaccaccccaggcacctgtgagccaacaggttaattagtccattaattttagtgggacctgcatatgttgaaaattaccaatactgactgacatgtgatgctgacctatgataaggttgagtatttattagatgggaagggaaatttggggattatttatcctcctggggacagtttggggaggattatttattgtatttatattgaattatgtacttttttcaataaagtcttatttttgtggctaaaaaaaa

SEQ ID NO: 765 - protein, 189 aa, Homo sapiens
MLGSRAVMLLLLLPWTAQGRAVPGGSSPAWTQCQQLSQKLCTLAWSAHPLVGHMDLREEGDEETTNDVPHIQCGDGCDPQGLRDNSQFCLQRIHQGLIFYEKLLGSDIFTGEPSLLPDSPVGQLHASLLGLSQLLQPEGHHWETQQIPSLSPSQPWQRLLLRFKILRSLQAFVAVAARVFAHGAATLSP

SEQ ID NO: 766 - DNA, 2319 bp, Homo sapiens
gcaaaacatttccctgctgggggcggcgaccaccgtgagcgtcccggaaggggcggcaaagacgcctccgtcgcgcacgaggtggcctcgttggctttaccttggttcgcggtcgtccttggttatcgtgagcgtccgcgagtctctgggaggccaagcctaggggcgccacagcgcctgcgcgcgtacggcggccggaaggggctagaggcggctccctgggtgacaaccgcgcgccccacctttccccacgtggccgcgaagaccggctcaggagcatctatcggctgcacgccaacatcaacacaggcgaagatggtctccaagcgcattgcccaggagacctttgatgcagctgtgcgcgagaacatcgaggagtttgcgatggggccagaggaggcagtgaaagaggccgtggagcagtttgaatcgcaaggggttgatctgagcaacattgtaaagacggcacctaaagtctctgcagacggatcccaggagcccacacatgacatcctgcagatgctcagtgacctccaggagtctgtggccagctctcgcccccaggaggtgtcagcatacctcacccgcttctgcgaccagtgcaaacaggacaaggcctgccgcttcctcgcggcccagaagggggcctaccccatcatcttcactgcctggaagctggccactgcaggtgaccagggccttctgctccagtccctcaatgccctgtcggtgctgactgatggacagccagacctcctggatgcccagggcctgcagctcctagtggccacgctgacccagaatgctgatgaggctgacctgacctgctctgggatccgctgtgtgcgtcacgcttgcctgaaacatgaacagaatcggcaagacctggtgaaagctggcgtgctgcctctgctgactggtgccatcacccatcatggccaccacactgacgtggtcagggaagcctgctgggccctgcgtgtcatgaccttcgatgacgacatccgtgtgccctttggccatgcccacaaccatgccaagatgattgtgcaggagaacaaaggcttgaaggtgctcatcgaagccaccaaagcgttcctggataaccctggcatcctgagcgagctctgtggaaccctgtcccgcctggccattcgcaacgagttctgccaggaggtcgtcgacctcgggggcctgagcattctggtgtccctgctagccgactgcaatgaccaccagatgagggaccagagcggcgttcaggagctcgtgaagcaagtgctgagcaccctgcgagccatcgcaggcaacgacgacgtgaaagatgctattgtccgtgctggtgggacggagtccatcgtggctgctatgacccagcatctgaccagcccccaggtgtgtgagcagagctgcgcggccctgtgcttcctggccctgcgtaagcccgacaacagccgcatcatcgtggagggtggcggggctgtggcagcactgcaggccatgaaggcacacccgcagaaggccggcgtgcagaaacaggcttgcatgctgatccgaaacctggtggcccacggccaggccttctcgaagcccatcctggacctgggggctgaggcactcatcatgcaggcccgatctgcccaccgtgactgtgaggacgtggccaaggccgccctgcgggacctgggttgtcatgtcgagctccgagagctgtggacaggccagaggggcaacctggcgccatgaccccaggcccagtctgggccgtgactctgggtgagtcgtgtgactcaggaatgggggtagatccatgtcctccactgtcccccattagttctgtccccttcacaatgagaagtgttttctggcaggccctaggtaaagggtcgggggaggggggagccttgtagggaggcctctacacagaagaaagcagcccccatgtcccagccacttctgggtcccagccagcagcacggatgttactgtcctgctccttcccccagccccacgccctaccagagggggcaaagggcacgtcccatcactcactgccctgtctgaaatgtggcagccactgtgggccaggctcagggcagggcaggcgattccagtggggttgggccccctggcgcctgctgcttactgcagtttcatgcaggcctctgctccttgtctttcttacctgtaaaatgggtctcagatgctccgccctgcttggccccagcttgtctgtctctgggtcctgggccagccaggatacctgataataaaagatcattgggtgaaaaaaaaaaaaaaaaaaaaaaaaaaaaaaaa

SEQ ID NO: 767 - protein, 476 aa, Homo sapiens
MVSKRIAQETFDAAVRENIEEFAMGPEEAVKEAVEQFESQGVDLSNIVKTAPKVSADGSQEPTHDILQMLSDLQESVASSRPQEVSAYLTRFCDQCKQDKACRFLAAQKGAYPIIFTAWKLATAGDQGLLLQSLNALSVLTDGQPDLLDAQGLQLLVATLTQNADEADLTCSGIRCVRHACLKHEQNRQDLVKAGVLPLLTGAITHHGHHTDVVREACWALRVMTFDDDIRVPFGHAHNHAKMIVQENKGLKVLIEATKAFLDNPGILSELCGTLSRLAIRNEFCQEVVDLGGLSILVSLLADCNDHQMRDQSGVQELVKQVLSTLRAIAGNDDVKDAIVRAGGTESIVAAMTQHLTSPQVCEQSCAALCFLALRKPDNSRIIVEGGGAVAALQAMKAHPQKAGVQKQACMLIRNLVAHGQAFSKPILDLGAEALIMQARSAHRDCEDVAKAALRDLGCHVELRELWTGQRGNLAP

SEQ ID NO: 768 - DNA, 2239 bp, Homo sapiens
aagcttgcacgaggccttcccggcggctgattcgagggcttgtttggtcagaaggggggcgtcagagaagctgccccttagccaaccatgccgtctgagggtcgctgctgggagaccttgaaggccctacgcagttccgacaaaggtcgcctttgctactaccgcgactggctgctgcggcgcgaggatgttttagaagaatgtatgtctcttcccaagctatcttcttattctggatgggtggtagagcacgtcctaccccatatgcaggagaaccaacctctgtctgagacttcgccatcctctacgtcagcttcagccctagatcaaccctcatttgttcccaaatctcctgacgcaagctctgccttttccccagcctcccctgcaacaccaaatggaaccaagggcaaagatgagtcccagcacacagaatctatggtacttcagtcctcacgggggatcaaagtggaaggctgcgtccgaatgtacgaactggtacacagaatgaaaggaacagagggcctgaggctatggcaggaggagcaggagaggaaggtgcaagccctctcggagatggcatctgaacaactgaagcggtttgatgaatggaaggaactgaagcagcataaagaattccaggacttgcgggaagtaatggagaagagctccagagaagccttgggacaccaagagaagttaaaagctgagcaccgtcacagagcaaagattctcaacctgaagctgcgggaagcagagcagcagcgcgtgaagcaagcagaacaggagcggcttcggaaggaagaaggccagatccgcctgcgggccctctatgctctgcaggaggagatgctgcagctcagccagcagctggatgcctctgagcagcacaaagccctgcttaaggtcgacctggctgccttccagacccgaggcaaccagctgtgcagcctcatctcagggatcatccgggcctcttcagagagcagctatcccacagcagagagtcaagctgaggctgagcgagctctgcgggaaatgcgggacctcctgatgaacttggggcaggagatcaccagagcctgcgaagacaagaggaggcaggatgaagaagaggcccaggtaaagctgcaagaggcacagatgcagcagggaccagaggcccacaaagagcccccagctcccagccagggcccaggagggaaacagaatgaagacctccaggtgaaggtacaagacattacaatgcagtggtaccagcagctgcaggatgcttccatgcagtgtgtgttgacctttgagggcctgaccaacagcaaggacagtcaggccaaaaagataaagatggacctccagaaggctgctaccatcccagtgagccaaatctctaccattgcaggctcaaaactgaaggagatctttgacaagatccacagcctgctctctggaaaacctgttcaatctggtgggcgctctgtgtctgtcacacttaacccacaggggctggactttgttcaatacaaactggcagagaaatttgtgaaacaaggcgaggaggaagtggcctctcaccatgaagcagcattccccattgcagttgtggcatccgggatctgggagctccaccccagagtgggggacctcattcttgctcatctacataagaagtgtccttactctgttcctttctatcccactttcaaggagggaatggctttggaagactatcagaggatgcttggttaccaagtaaaggattccaaagtggagcagcaagacaactttctaaaacgcatgtcagggatgatccgtctctacgctgctatcatccagctccggtggccatatggaaaccgacaggagattcaccctcatggcttaaatcatggatggcgctggttggcacagatcttaaacatggagcccttgtcagatgtgacagccaccctcctctttgacttcctggaggtgtgtgggaatgccctcatgaagcaataccaggttcagttctggaagatgctaattctcatcaaagaggactactttcccaggtatcaggcttgttgagcagacagcaggggattaagtaactcataaccaggcctcagatacccaagggtgctattacctgctggttttgattcaagttaaaaacacctgtactaagtatgacatctttcctactccagtccctctcgttgatatttgaataaatgcttttgaaccttaaaaaaaaaaa

SEQ ID NO: 769 - protein, 659 aa, Homo sapiens
MPSEGRCWETLKALRSSDKGRLCYYRDWLLRREDVLEECMSLPKLSSYSGWVVEHVLPHMQENQPLSETSPSSTSASALDQPSFVPKSPDASSAFSPASPATPNGTKGKDESQHTESMVLQSSRGIKVEGCVRMYELVHRMKGTEGLRLWQEEQERKVQALSEMASEQLKRFDEWKELKQHKEFQDLREVMEKSSREALGHQEKLKAEHRHRAKILNLKLREAEQQRVKQAEQERLRKEEGQIRLRALYALQEEMLQLSQQLDASEQHKALLKVDLAAFQTRGNQLCSLISGIIRASSESSYPTAESQAEAERALREMRDLLMNLGQEITRACEDKRRQDEEEAQVKLQEAQMQQGPEAHKEPPAPSQGPGGKQNEDLQVKVQDITMQWYQQLQDASMQCVLTFEGLTNSKDSQAKKIKMDLQKAATIPVSQISTIAGSKLKEIFDKIHSLLSGKPVQSGGRSVSVTLNPQGLDFVQYKLAEKFVKQGEEEVASHHEAAFPIAVVASGIWELHPRVGDLILAHLHKKCPYSVPFYPTFKEGMALEDYQRMLGYQVKDSKVEQQDNFLKRMSGMIRLYAAIIQLRWPYGNRQEIHPHGLNHGWRWLAQILNMEPLSDVTATLLFDFLEVCGNALMKQYQVQFWKMLILIKEDYFPRYQAC

SEQ ID NO: 770 - DNA, 1070 bp, Homo sapiens
ggggtggcgcccggagctgcacggagagcgtgcccgtcagtgaccgaagaagagaccaagatgaatgcagagcccgagaggaagtttggcgtggtggtggttggtgttggccgagccggctccgtgcggatgagggacttgcggaatccacacccttcctcagcgttcctgaacctgattggcttcgtgtcgagaagggagctcgggagcattgatggagtccagcagatttctttggaggatgctctttccagccaagaggtggaggtcgcctatatctgcagtgagagctccagccatgaggactacatcaggcagttccttaatgctggcaagcacgtccttgtggaataccccatgacactgtcattggcggccgctcaggaactgtgggagctggctgagcagaaaggaaaagtcttgcacgaggagcatgttgaactcttgatggaggaattcgctttcctgaaaaaagaagtggtggggaaagacctgctgaaagggtcgctcctcttcacatctgacccgttggaagaagaccggtttggcttccctgcattcagcggcatctctcgactgacctggctggtctccctctttggggagctttctcttgtgtctgccactttggaagagcgaaaggaagatcagtatatgaaaatgacagtgtgtctggagacagagaagaaaagtccactgtcatggattgaagaaaaaggacctggtctaaaacgaaacagatatttaagcttccatttcaagtctgggtccttggagaatgtgccaaatgtaggagtgaataagaacatatttctgaaagatcaaaatatatttgtccagaaactcttgggccagttctctgagaaggaactggctgctgaaaagaaacgcatcctgcactgcctggggcttgcagaagaaatccagaaatattgctgttcaaggaagtaagaggaggaggtgatgtagcacttccaagatggcaccagcatttggttcttctcaagagttgaccattatctctattcttaaaattaaacatgttggggaaacaaaaaaaaaaaaaaaaa

SEQ ID NO: 771 - protein, 296 aa, Homo sapiens
MNAEPERKFGVVVVGVGRAGSVRMRDLRNPHPSSAFLNLIGFVSRRELGSIDGVQQISLEDALSSQEVEVAYICSESSSHEDYIRQFLNAGKHVLVEYPMTLSLAAAQELWELAEQKGKVLHEEHVELLMEEFAFLKKEVVGKDLLKGSLLFTSDPLEEDRFGFPAFSGISRLTWLVSLFGELSLVSATLEERKEDQYMKMTVCLETEKKSPLSWIEEKGPGLKRNRYLSFHFKSGSLENVPNVGVNKNIFLKDQNIFVQKLLGQFSEKELAAEKKRILHCLGLAEEIQKYCCSRK

SEQ ID NO: 772 - DNA, 1299 bp, Homo sapiens
gaattggcagccaacatggcggcggaacgcggcgcggggcagcaacagtcgcaggagatgatggaggttgacaggcgggtcgagtctgaagaatccggcgatgaagaagggaagaaacacagcagtggcatcgtggccgacctcagtgaacagagcctgaaggatggggaggagcggggggaggaggacccagaagaagaacatgagctgcctgtggacatggaaaccatcaacctggacagagatgcagaggatgttgatttgaatcactatcgcatagggaagattgaaggatttgaggtactgaagaaagtgaagactctctgcctccgccaaaatttaattaaatgcattgagaatctggaggagctacagagtcttcgagagctggatctttacgacaaccagatcaagaagattgagaatctggaggcgctaacagagctggagattctagatatttcttttaatctgctgagaaacatcgaaggggttgacaagttgacacgactgaaaaaactcttcttggtcaacaataaaatcagtaaaattgagaacttaagcaacttacatcaactacagatgctagagctgggatctaaccgcatccgggcaatcgaaaatatcgacaccttaaccaacctggagagtttgtttttggggaaaaacaaaattactaaacttcagaacctggatgcgctcaccaacctgacagtcctcagtatgcagagcaaccggctgaccaagatcgagggtctgcagaacctggtgaacctgcgggagctgtaccttagccacaatggcatcgaggtcatcgagggcctggagaacaataacaaactcacgatgttggacattgcatcaaatagaatcaaaaagattgaaaatatcagccatctaacagagctgcaagagttctggatgaacgacaatctccttgagagctggagcgacctcgacgagctgaagggagccaggagcctggagacagtgtacctggagcggaaccccttgcagaaggacccccagtaccggcggaaggtcatgctcgccctcccctccgtgcggcagatcgatgccacgttcgtcaggttctgagtccttcttggctcctcatgtggtccctctcctcggaagaactgcccagccacgggtttttaacccacctgttgctcctgaggtcgtcactatatcaacagtcacaaacccaatggcaataaaggcactgacgatagctggcgcgcgcgacgccacacaccattttcagatgccgttgcaattaaatcttgccacactgtc

SEQ ID NO: 773 - protein, 360 aa, Homo sapiens
MAAERGAGQQQSQEMMEVDRRVESEESGDEEGKKHSSGIVADLSEQSLKDGEERGEEDPEEEHELPVDMETINLDRDAEDVDLNHYRIGKIEGFEVLKKVKTLCLRQNLIKCIENLEELQSLRELDLYDNQIKKIENLEALTELEILDISFNLLRNIEGVDKLTRLKKLFLVNNKISKIENLSNLHQLQMLELGSNRIRAIENIDTLTNLESLFLGKNKITKLQNLDALTNLTVLSMQSNRLTKIEGLQNLVNLRELYLSHNGIEVIEGLENNNKLTMLDIASNRIKKIENISHLTELQEFWMNDNLLESWSDLDELKGARSLETVYLERNPLQKDPQYRRKVMLALPSVRQIDATFVRF

SEQ ID NO: 774 - DNA, 2049 bp, Homo sapiens
gagcgcgcctagccggctcgcgagacttgacccaatgaaagaagcatatggcacttgtgaagataaatgttactcctccctttttaattggaacttctgcttaggacctgtgtatgacgtttcacctgtgatctgttctttcggtagccactgactttgagttacaggaaggtctccgaagatttgtgtcaaatgacgtcaatggccagcttgttttcttttactagtccagcagtaaagcgattgttgggctggaaacaaggtgatgaggaggagaaatgggcagaaaaggcagttgatgctttggtgaagaaactaaaaaagaaaaagggtgccatggaggaactggagaaagccttgagcagtccaggacagccgagtaaatgtgtcactattcccagatctttagatggacgcctgcaggtttctcacagaaaaggcttaccccatgttatatattgtcgtgtttggcgctggccggatttgcagagtcatcatgagctaaagccgttggatatttgtgaatttccttttggatctaagcaaaaagaagtttgtatcaacccataccactataagagagtggagagtccagtcttacctccagtattagtgcctcgtcataatgaattcaatccacaacacagccttctggttcagtttaggaacctgagccacaatgaaccacacatgccacaaaatgccacgtttccagattctttccaccagcccaacaacactccttttcccttatctccaaacagcccttatcccccttctcctgctagcagcacatatcccaactccccagcaagttctggaccaggaagtccatttcagctcccagctgatacgcctcctcctgcctatatgccacctgatgatcagatgggtcaagataattcccagcctatggatacaagcaataatatgattcctcagattatgcccagtatatccagcagggatgttcagcctgttgcctatgaagagcctaaacattggtgttcaatagtctactatgaattaaacaatcgtgttggagaagcttttcatgcatcttctactagtgtgttagtagatggattcacagatccttcaaataacaaaagtagattctgcttgggtttgttgtcaaatgttaatcgtaattcgacaattgaaaacactaggcgacatattggaaaaggtgttcatctgtactatgttggtggagaggtgtatgcggaatgcctcagtgacagcagcatatttgtacagagtaggaactgcaactttcatcatggctttcatcccaccactgtctgtaagattcccagcagctgcagcctcaaaatttttaacaatcaggagtttgctcagcttctggctcaatctgtcaaccatgggtttgaggcagtatatgagctcaccaaaatgtgtaccattcggatgagttttgtcaagggttggggagcagaatatcaccggcaggatgtaaccagcaccccatgttggattgagattcatcttcatgggcctcttcagtggctggataaagtccttactcagatgggctcccctctgaaccccatatcttctgtttcataatgcagaagtattcttttcaattatattgttagtggacttgttttaattttagagaaactttgagtacagatactgtgagcttacattgaaaacagatattacagcttatttttttctacataattgtgaccaatacatttgtattttgtgatgaatctacatttgtttgtattcatgttcatgtgattaactcttagaagtgttgtaaaagatgcagagtaagtattatgccccagttcagaaatttggcattgatcttaaactggaacatgcttttactttattgccctaacaattttttattaaatttatttgaaaatgcatcacatgatgaaaaattatagtagcttataagagggcatatacagtgaagagtaagttttccctcctactctcgatcttccagaagctgtacttttaccagtttctttgtcccaccaacttaaaaaaaaaaaaaaa

SEQ ID NO: 775 - protein, 465 aa, Homo sapiens
MTSMASLFSFTSPAVKRLLGWKQGDEEEKWAEKAVDALVKKLKKKKGAMEELEKALSSPGQPSKCVTIPRSLDGRLQVSHRKGLPHVIYCRVWRWPDLQSHHELKPLDICEFPFGSKQKEVCINPYHYKRVESPVLPPVLVPRHNEFNPQHSLLVQFRNLSHNEPHMPQNATFPDSFHQPNNTPFPLSPNSPYPPSPASSTYPNSPASSGPGSPFQLPADTPPPAYMPPDDQMGQDNSQPMDTSNNMIPQIMPSISSRDVQPVAYEEPKHWCSIVYYELNNRVGEAFHASSTSVLVDGFTDPSNNKSRFCLGLLSNVNRNSTIENTRRHIGKGVHLYYVGGEVYAECLSDSSIFVQSRNCNFHHGFHPTTVCKIPSSCSLKIFNNQEFAQLLAQSVNHGFEAVYELTKMCTIRMSFVKGWGAEYHRQDVTSTPCWIEIHLHGPLQWLDKVLTQMGSPLNPISSVS

SEQ ID NO: 776 - DNA, 13449 bp, Homo sapiens
  misc_feature (11967)..(11967): n is a, c, g, or t
  misc_feature (12008)..(12008): n is a, c, g, or t
  misc_feature (12013)..(12013): n is a, c, g, or t
gcggccgcgtcgacgcggcggcggcagcggcgtcggctcggggttctccgggagagggggagtgcgcggcggccgcagctgccacaaaccaggtgaagctttgttctaagaatatttgtttcatctagtttatgagtccaaatgatatagactgtaaatgtcacagcagtggtgaaagactgctcggtcatgagcaccgacagtaactcactggcacgtgaatttctgaccgatgtcaaccggctttgcaatgcagtggtccagagggtggaggccagggaggaagaagaggaggagacgcacatggcaacccttggacagtaccttgtccatggtcgaggatttctattacttaccaagctaaattctataattgatcaggcattgacatgtagagaagaactcctgactcttcttctgtctctccttccactggtatggaagatacctgtccaagaagaaaaggcaacagattttaacctaccgctctcagcagatataatcctgaccaaagaaaagaactcaagttcacaaagatccactcaggaaaaattacatttagaaggaagtgccctgtctagtcaggtttctgcaaaagtaaatgtttttcgaaaaagcagacgacagcgtaaaattacccatcgctattctgtaagagatgcaagaaagacacagctctccacctcagattcagaagccaattcagatgaaaaaggcatagcaatgaataagcatagaaggccccatctgctgcatcattttttaacatcgtttcctaaacaagaccaccccaaagctaaacttgaccgcttagcaaccaaagaacagactcctccagatgctatggctttggaaaattccagagagattattccaagacaggggtcaaacactgacattttaagtgagccagctgccttgtctgttatcagtaacatgaacaattctccatttgacttatgtcatgttttgttatctttattagaaaaagtttgtaagtttgacgttaccttgaatcataattctcctttagcagccagtgtagtgcccacactaactgaattcctagcaggctttggggactgctgcagtctgagcgacaacttggagagtcgagtagtttctgcaggttggaccgaagaaccggtggctttgattcaaaggatgctctttcgaacagtgttgcatcttctgtcagtagatgttagtactgcagagatgatgccagaaaatcttaggaaaaatttaactgaattgcttagagcagctttaaaaattagaatatgcctagaaaagcagcctgacccttttgcaccaagacaaaagaaaacactgcaggaggttcaggaagattttgtgttttcaaagtatcgtcatagagcccttcttttacctgagcttttggaaggagttcttcagattctgatctgttgtcttcaaagtgcagcttcaaatcccttctacttcagtcaagccatggatttggttcaagaattcattcagcatcatggatttaatttatttgaaacagcagttcttcaaatggaatggctggttttaagagatggagttcctcccgaggcctcagagcatttgaaagccctaataaatagtgtgatgaaaataatgagcactgtcaaaaaagtgaaatcagagcaacttcatcattcgatgtgtacaagaaaaaggcacagacgatgtgaatattctcattttatgcatcatcaccgagatctctcaggtcttctggtttcggcttttaaaaaccaggtttccaaaaacccatttgaagagactgcagatggagatgtttattatcctgagcggtgctgttgcattgcagtgtgtgcccatcagtgcttgcgcttactacagcaggcttccttgagcagcacttgtgtccagatcctatcgggtgttcataacattggaatatgctgttgtatggatcccaaatctgtaatcattcctttgctccatgcttttaaattgccagcactgaaaaattttcagcagcatatattgaatatccttaacaaacttattttggatcagttaggaggagcagagatatcaccaaaaattaaaaaagcagcttgtaatatttgtactgttgactctgaccaactagcccaattagaagagacactgcagggaaacttatgtgatgctgaactctcctcaagtttatccagtccttcttacagatttcaagggatcctgcccagcagtggatctgaagatttgttgtggaaatgggatgctttaaaggcttatcagaactttgtttttgaagaagacagattacatagtatacagattgcaaatcacatttgcaatttaatccagaaaggcaatatagttgttcagtggaaattatataattacatatttaatcctgtgctccaaagaggagttgaattagcacatcattgtcaacacctaagcgttacttcagctcaaagtcatgtatgtagccatcataaccagtgcttgcctcaggacgtgcttcagatttatgtaaaaactctgcctatcctgcttaaatccagggtaataagagatttgtttttgagttgtaatggagtaagtcaaataatcgaattaaattgcttaaatggtattcgaagtcattctctaaaagcatttgaaactctgataatcagcctaggggagcaacagaaagatgcctcagttccagatattgatgggatagacattgaacagaaggagttgtcctctgtacatgtgggtacttcttttcatcatcagcaagcttattcagattctcctcagagtctcagcaaattttatgctggcctcaaagaagcttatccaaagagacggaagactgttaaccaagatgttcatatcaacacaataaacctattcctctgtgtggcttttttatgcgtaagtaaagaagcagagtctgacagggagtcggccaatgactcagaagatacttctggctatgacagcacagccagcgagcctttaagtcatatgctgccatgtatatctctcgagagccttgtcttgccttctcctgaacatatgcaccaagcagcagacatttggtctatgtgtcgttggatctacatgttgagttcagtgttccagaaacagttttataggcttggtggtttccgagtatgccataagttaatatttatgataatacagaaactgttcagaagtcacaaagaggagcaaggaaaaaaggagggagatacaagtgtaaatgaaaaccaggatttaaacagaatttctcaacctaagagaactatgaaggaagatttattatctttggctataaaaagtgaccccataccatcagaactaggtagtctaaaaaagagtgctgacagtttaggtaaattagagttacagcatatttcttccataaatgtggaagaagtttcagctactgaagccgctcccgaggaagcaaagctatttacaagtcaagaaagtgagacctcacttcaaagtatacgacttttggaagcccttctggccatttgtcttcatggtgccagaactagtcaacagaagatggaattggagttacctaatcagaacttgtctgtggaaagtatattatttgaaatgagggaccatctttcccagtcaaaggtgattgaaacacaactagcaaagccgttatttgatgccctgcttcgagttgccctcgggaattattcagcagattttgaacataatgatgctatgactgagaagagtcatcaatctgcagaagaattgtcatcccagcctggtgatttttcagaagaagctgaggattctcagtgttgtagttttaaacttttagttgaagaagaaggttacgaagcagatagtgaaagcaatcctgaagatggcgaaacccaggatgatggggtagacttaaagtctgaaacagaaggtttcagtgcatcaagcagtccaaatgacttactcgaaaacctcactcaaggggaaataatttatcctgagatttgtatgctggaattaaatttgctttctgctagtaaagccaaacttgatgtgcttgcccatgtatttgagagttttttgaaaattattaggcagaaagaaaagaatgtttttctgctcatgcaacagggaactgtgaaaaatcttttaggagggttcttgagtattttaacacaggatgattctgattttcaagcatgccagagagtattggtggatcttttggtatctttgatgagttcaagaacatgttcagaagagctaacccttcttttgagaatatttctggagaaatctccttgtacaaaaattcttcttctgggtattctgaaaattattgaaagtgatactactatgagcccttcacagtatctaaccttccctttactgcacgctccaaatttaagcaacggtgtttcatcacaaaagtatcctgggattttaaacagtaaggccatgggtttattgagaagagcacgagtttcacggagcaagaaagaggctgatagagagagttttccccatcggctgctttcatcttggcacatagccccagtccacctgccgttgctggggcaaaactgctggccacacctatcagaaggtttcagtgtttccctgtggtttaatgtggagtgtatccatgaagctgagagtactacagaaaaaggaaagaagataaagaaaagaaacaaatcattaattttaccagatagcagttttgatggtacagagagcgacagaccagaaggtgcagagtacataaatcctggtgaaagactcatagaagaaggatgtattcatataatttcactgggatccaaagcgttgatgatccaagtgtgggctgatccccacaatgccactcttatctttcgtgtgtgcatggattcaaatgatgacatgaaagctgttttactagcacaggttgaatcacaggagaatattttcctcccaagcaaatggcaacatttagtactcacctacttacagcagccccaagggaaaaggaggattcatgggaaaatctccatatgggtctctggacagaggaagcctgatgttactttggattttatgcttccaagaaaaacaagtttgtcatctgatagcaataaaacattttgcatgattggccattgtttatcatcccaagaagagtttttgcagttggctggaaaatgggacctgggaaatttgcttctcttcaacggagctaaggttggttcacaagaggccttttatctgtatgcttgtggacccaaccatacatctgtaatgccatgtaagtatggcaagccagtcaatgactactccaaatatattaataaagaaattttgcgatgtgaacaaatcagagaactttttatgaccaagaaagatgtggatattggtctcttaattgaaagtctttcagttgtttatacaacttactgtcctgctcagtataccatctatgaaccagtgattagacttaaaggtcaaatgaaaacccaactctctcaaagacccttcagctcaaaagaagttcagagcatcttattagaacctcatcatctaaagaatctccaacctactgaatataaaactattcaaggcattctgcacgaaattggtggaactggcatatttgtttttctctttgccagggttgttgaactcagtagctgtgaagaaactcaagcattagcactgcgagttatactctcattaattaaatacaaccaacaaagagtacatgaattagaaaattgtaatggactttctatgattcatcaggtgttgatcaaacaaaaatgcattgttgggttttacattttgaagacccttcttgaaggatgctgtggtgaagatattatttatatgaatgagaatggagagtttaagttggatgtagactctaatgctataatccaagatgttaagctgttagaggaactattgcttgactggaagatatggagtaaagcagagcaaggtgtttgggaaactttgctagcagctctagaagtcctcatcagagcagatcaccaccagcagatgtttaatattaagcagttattgaaagctcaagtggttcatcactttctactgacttgtcaggttttgcaggaatacaaagaggggcaactcacacccatgccccgagaggtttgtagatcatttgtgaaaattatagcagaagtccttggatctcctccagatttggaattattgacaattatcttcaatttccttttagcagttcaccctcctactaatacttacgtttgtcacaatcccacgaacttctacttttctttgcacatagatggcaagatctttcaggagaaagtgcggtcaatcatgtacctgaggcattccagcagtggaggaaggtcccttatgagccctggatttatggtaataagcccatctggttttactgcttcaccatatgaaggagagaattcctctaatattattccacaacagatggccgcccatatgctgcgttctagaagcctaccagcattccctacttcttcactactaacgcaatcacaaaaactgactggaagtttgggttgtagtatcgacaggttacaaaatattgcagatacttatgttgccacccaatcaaagaaacaaaattctttggggagttccgacacactgaaaaaaggcaaagaggacgcattcatcagtagctgtgagtctgcaaaaactgtttgtgaaatggaagctgtcctctcagcccaggtctctgtcagtgatgtcccaaagggagtgctgggatttccagtggtcaaagcagatcataaacagttgggagcagaacccaggtcagaagatgacagtcctggggatgagtcctgcccacgccgacctgattacctaaagggattggcctccttccagcgaagccacagcactattgcaagccttgggctagcttttccttcacagaacggatctgcagctgttggccgttggccaagtcttgttgatagaaacactgatgattgggaaaactttgcctattctcttggttatgagccaaattacaaccgaactgcaagtgctcacagtgtaactgaagactgtttggtacctatatgctgtggattatatgaactcctaagtggggttcttcttatcctgcctgatgttttgcttgaagatgtgatggacaagcttattcaagcagatacacttttggtcctcgttaaccacccatcaccagctatacaacaaggtgttattaaactattagatgcatattttgctagagcatctaaggaacaaaaagataaatttctgaagaatcgtggattttccttgctagccaaccagttgtatcttcatcgaggaactcaagaattgttagaatgcttcatcgaaatgttctttggtcgacatattggccttgatgaagaatttgatctggaagatgtgagaaacatgggattgtttcagaagtggtctgtcattcctattctgggactaatagagacctctctatatgacaacatactcttgcataatgctcttttacttcttctccaaattttaaattcttgttctaaggtagcagatatgttgctggataatggtctactctatgtgttatgtaatacagtagcagccctgaatggattagaaaagaacattcccatgagtgaatataaattgcttgcttgtgatatacagcaacttttcatagcagttacaattcatgcttgcagttcctcaggctcacaatattttagggttattgaagaccttattgtaatgcttggatatcttcaaaatagcaaaaacaagaggacacaaaatatggctgttgcactacagcttagagttctccaggctgctatggaatttataaggaccaccgcaaatcatgactctgaaaacctcacagattcactccagtcaccttctgctccccatcatgcagtagttcaaaagcggaaaagcattgctggtcctcgaaaatttccccttgctcaaactgaatcgcttctgatgaaaatgcgttcagtggcaaatgatgagcttcatgtgatgatgcaacggagaatgagccaagagaaccctagccaagcaactgaaacggaacttgcgcagagactacagaggctcactgttttagcagtcaacaggattatttatcaagaatttaattcagacattattgacattttgagaactccagaaaatgtaactcaaagcaagacctcagttttccagaccgaaatttctgaggaaaatattcatcatgaacagtcttctgttttcaatccatttcagaaagaaatttttacatatctggtagaaggattcaaagtatctattggttcaagtaaagccagtggttccaagcagcaatggactaaaattctgtggtcttgtaaggagaccttccgaatgcagcttgggagactactagtgcatattttgtcgccagcccacgctgcacaagagagaaagcaaatttttgaaatagttcatgaaccaaatcatcaggaaatactacgagactgtctcagcccatccctacaacatggagccaagttagttttgtatttgtcagagttgatacataatcaccaaggtgaattgactgaagaagagctaggcacagcagaactgcttatgaatgctttgaagttatgtggtcacaagtgcatccctcccagtgcatcaacaaaagcagaccttattaaaatgatcaaagaggaacaaaagaaatatgaaactgaagaaggagtgaataaagctgcttggcagaaaacagttaacaataatcaacaaagtctctttcagcgtctggattcaaaatcaaaggatatatctaaaatagctgcagatatcacccaggcagtgtctctctcccaaggaaatgagagaaaaaaggtgatccagcatattagaggaatgtataaagtagatttgagtgccagcagacattggcaggaacttattcagcagctgacacatgatagagcagtatggtatgaccccatctactatccaacctcatggcagttggatccaacagaagggccaaatcgagagaggagacgtttacagagatgttatttaactattccaaataagtatctccttagggatagacagaaatcagaagatgttgtcaaaccaccactctcttacctgtttgaagacaaaactcattcttctttctcttctactgtcaaagacaaagctgcaagtgaatctataagagtgaatcgaagatgcatcagtgttgcaccatctagagagacagctggtgaattgttactaggtaaatgtggaatgtattttgtggaagataatgcttctgatacagttgaaagttcgagccttcagggagagttggaaccagcatcattttcctggacatatgaagaaattaaagaagttcacaagcgttggtggcaattgagagataatgctgtagaaatctttctaacaaatggcagaacactcctgttggcatttgataacaccaaggttcgtgatgatgtataccacaatatactcacaaataacctccctaatcttctggaatatggtaacatcaccgctctgacaaatttatggtatactgggcaaattactaattttgaatatttgactcacttaaacaaacatgctggccgatccttcaatgatctcatgcagtatcctgtgttcccatttatacttgctgactacgttagtgagacacttgacctcaatgatctgttgatatacagaaatctctctaaacctatagctgttcagtataaagaaaaagaagatcgttatgtggacacatacaagtacttggaggaagagtaccgcaaaggagccagagaagatgaccccatgcctcccgtgcagccctatcactatggctcccactattccaatagcggcactgtgcttcacttcctggtcaggatgcctcctttcactaaaatgtttttagcctatcaagatcaaagttttgacattccagacagaacttttcattctacaaatacaacttggcgactctcatcttttgaatctatgactgatgtgaaagaacttatcccagagtttttctatcttccagagttcctagttaaccgtgaaggttttgattttggtgtgcgtcagaatggtgaacgggttaatcacgtcaaccttcccccttgggcgcgtaatgatcctcgtctttttatcctcatccatcggcaggctctagagtctgactacgtgtcgcagaacatctgtcagtggattgacttggtgtttgggtataagcaaaaggggaaggcttctgttcaagcgatcaatgtttttcatcctgctacatattttggaatggatgtctctgcagttgaagatccagttcagagacgagcgctagaaaccatgataaaaacctacgggcagactccccgtcagctgttccacatggcccatgtgagcagacctggagccaagctcaatattgaaggagagcttccagctgctgtggggttgctagtgcagtttgctttcagggagacccgagaacaggtcaaagaaatcacctatccgagtcctttgtcatggataaaaggcttgaaatggggggaatacgtgggttcccccagtgctccagtacctgtggtctgcttcagccagccccacggagaaagatttggctctctccaggctctgcccaccagagcaatctgtggtttgtcacggaatttctgtcttgtgatgacatatagcaaggaacaaggtgtgagaagcatgaacagtacggacattcagtggtcagccatcctgagctggggatatgctgataatattttaaggttgaagagtaaacaaagtgagcctccagtaaactttattcaaagttcacaacagtaccaggtgactagttgtgcttgggtgcctgacagttgccagctgtttactggaagcaaatgcggtgtcatcacagcctacacaaacagatttacaagcagcacgccatcagaaatagaaatggagactcaaatacatctctatggtcacacagaagagataaccagcttatttgtttgcaaaccatacagtatactgataagtgtgagcagagacggaacctgcatcatatgggatttaaacaggttatgctatgtacaaagtctggcgggacacaaaagccctgtcacagctgtctctgccagtgaaacctcaggtgatattgctactgtgtgtgattcagctggcggaggcagtgacctcagactctggacggtgaacggggatctcgttggacatgtccactgcagggagatcatctgttccgtggctttctccaaccagcctgagggagtatctatcaatgtaatcgctgggggattagaaaatggaattgtaaggttatggagcacatgggacttaaagcctgtgagagaaattacatttcccaaatcaaataagcccatcatcagccttacattttcttgtgatggccaccatttgtacacagcaaacagtgatgggaccgtgattgcctggtgtcggaaggaccagcagcgcttgaaacagccaatgttctattccttccttagcagctatgcagccgggtgaatgcgaatgaacttcacgttctccaaagcactttaactccaaactagatttgttgacttcaccagttttaggaggttgaacctaaagaaatggatgactggacaaaccatccaaataatgataaagtctattcatctgcacaaaattctgaagagtcacatgatcctaagaggaaagttctgttctattttagtgataatctggaagattgtgtcaatatgcactagccaacaagttttaagcctcgcatggtacattaaaatgatattcttaaaattttttcccaccaaggtattccaaagaaaatattaaggtctcccctttttctatgattccaaaaggaccagtagaatttaaattggttggttgatngtttatataaaacacactaaaattatattttaaaagtttantgccntgaaatactcctcccaccacacacacatgctccaaaagaggaaagaaaaaaagataatttttaggacttgataattgctttctttgagaagcaaattattcagtaggtgcctctgtaccaaatattttatggaatatctaaatactaaaataaactatgaatgaatctcaaaattaggcagtttttgccagttgctttcttagctcaaaggagaaccagaatttttttgacagccacaaacaagaatacaggtatcttggatttcagacacattctgtttcttcataaaaattttacttaaaatctgtaacgctagatattgactatccttagttgagtcactgaggtttaaacacaatggtaagtcttaaagtctgctatttacagagcattgaatctgtaccaatttgcaatagaaagccttcagtatgcaagaagtttgcatgggtattaagaacacagcctaaataaggcatttgatctaatctgcaggaagaattttcttccccaaaacagaattataaaagcttactttaaacaggaggcagaataattcttttaggaaaccatttcattctgtttctactaacctataccatctgagaattcctaaacatcttggagccgtctgtctctcccatatgatggctgtctgtatatttttacttggggtgctgctttattggctttgaaaacactgtcagataagctcagtaatatgttaccatgggataaaaatatgtatccctgcctaagaataacttgtgcatttgttatggaaatttaattcatatggtgtttacagtactacttttgtaacttccagactttctaaaacattctgcttaaaaaccatataaaatataattccaaagtctctgctgtcaagatagattcgagagaaagcacgtggccatgtatgctttaaccttaaactgcatacacatgtagtgatacctaggctgcatttagatcaccgtgtgctcaggccaggtgtgaatcctgaggtccatggaggtgcagagatgagattactcctattcacgttgaagtgatttgctttgttaacaaaaaattgcagctattgtctagctttcatttttttactgagaactttaaattagtcccctattagaatagggttgctactcatctttttttaaaaaccgaatttcatcatttatctaaagagaaaatatgcagaataactggtcttgttaagagtgcaatattatatttttatgtaaaaataaaaattaatttggggggattatttattcagcatgaaacctaatatgtatatgtttgaaatacttcataatgtgcatgttgtagcaaacatttctgtaaattatcacaagctctgttacctttatatacgctgcctcttcaatttggaaataaatttcataaaaaaaaaaaaaaaaaaaaaaaaa

SEQ ID NO: 777 - protein, 3801 aa, Homo sapiens
MSTDSNSLAREFLTDVNRLCNAVVQRVEAREEEEEETHMATLGQYLVHGRGFLLLTKLNSIIDQALTCREELLTLLLSLLPLVWKIPVQEEKATDFNLPLSADIILTKEKNSSSQRSTQEKLHLEGSALSSQVSAKVNVFRKSRRQRKITHRYSVRDARKTQLSTSDSEANSDEKGIAMNKHRRPHLLHHFLTSFPKQDHPKAKLDRLATKEQTPPDAMALENSREIIPRQGSNTDILSEPAALSVISNMNNSPFDLCHVLLSLLEKVCKFDVTLNHNSPLAASVVPTLTEFLAGFGDCCSLSDNLESRVVSAGWTEEPVALIQRMLFRTVLHLLSVDVSTAEMMPENLRKNLTELLRAALKIRICLEKQPDPFAPRQKKTLQEVQEDFVFSKYRHRALLLPELLEGVLQILICCLQSAASNPFYFSQAMDLVQEFIQHHGFNLFETAVLQMEWLVLRDGVPPEASEHLKALINSVMKIMSTVKKVKSEQLHHSMCTRKRHRRCEYSHFMHHHRDLSGLLVSAFKNQVSKNPFEETADGDVYYPERCCCIAVCAHQCLRLLQQASLSSTCVQILSGVHNIGICCCMDPKSVIIPLLHAFKLPALKNFQQHILNILNKLILDQLGGAEISPKIKKAACNICTVDSDQLAQLEETLQGNLCDAELSSSLSSPSYRFQGILPSSGSEDLLWKWDALKAYQNFVFEEDRLHSIQIANHICNLIQKGNIVVQWKLYNYIFNPVLQRGVELAHHCQHLSVTSAQSHVCSHHNQCLPQDVLQIYVKTLPILLKSRVIRDLFLSCNGVSQIIELNCLNGIRSHSLKAFETLIISLGEQQKDASVPDIDGIDIEQKELSSVHVGTSFHHQQAYSDSPQSLSKFYAGLKEAYPKRRKTVNQDVHINTINLFLCVAFLCVSKEAESDRESANDSEDTSGYDSTASEPLSHMLPCISLESLVLPSPEHMHQAADIWSMCRWIYMLSSVFQKQFYRLGGFRVCHKLIFMIIQKLFRSHKEEQGKKEGDTSVNENQDLNRISQPKRTMKEDLLSLAIKSDPIPSELGSLKKSADSLGKLELQHISSINVEEVSATEAAPEEAKLFTSQESETSLQSIRLLEALLAICLHGARTSQQKMELELPNQNLSVESILFEMRDHLSQSKVIETQLAKPLFDALLRVALGNYSADFEHNDAMTEKSHQSAEELSSQPGDFSEEAEDSQCCSFKLLVEEEGYEADSESNPEDGETQDDGVDLKSETEGFSASSSPNDLLENLTQGEIIYPEICMLELNLLSASKAKLDVLAHVFESFLKIIRQKEKNVFLLMQQGTVKNLLGGFLSILTQDDSDFQACQRVLVDLLVSLMSSRTCSEELTLLLRIFLEKSPCTKILLLGILKIIESDTTMSPSQYLTFPLLHAPNLSNGVSSQKYPGILNSKAMGLLRRARVSRSKKEADRESFPHRLLSSWHIAPVHLPLLGQNCWPHLSEGFSVSLWFNVECIHEAESTTEKGKKIKKRNKSLILPDSSFDGTESDRPEGAEYINPGERLIEEGCIHIISLGSKALMIQVWADPHNATLIFRVCMDSNDDMKAVLLAQVESQENIFLPSKWQHLVLTYLQQPQGKRRIHGKISIWVSGQRKPDVTLDFMLPRKTSLSSDSNKTFCMIGHCLSSQEEFLQLAGKWDLGNLLLFNGAKVGSQEAFYLYACGPNHTSVMPCKYGKPVNDYSKYINKEILRCEQIRELFMTKKDVDIGLLIESLSVVYTTYCPAQYTIYEPVIRLKGQMKTQLSQRPFSSKEVQSILLEPHHLKNLQPTEYKTIQGILHEIGGTGIFVFLFARVVELSSCEETQALALRVILSLIKYNQQRVHELENCNGLSMIHQVLIKQKCIVGFYILKTLLEGCCGEDIIYMNENGEFKLDVDSNAIIQDVKLLEELLLDWKIWSKAEQGVWETLLAALEVLIRADHHQQMFNIKQLLKAQVVHHFLLTCQVLQEYKEGQLTPMPREVCRSFVKIIAEVLGSPPDLELLTIIFNFLLAVHPPTNTYVCHNPTNFYFSLHIDGKIFQEKVRSIMYLRHSSSGGRSLMSPGFMVISPSGFTASPYEGENSSNIIPQQMAAHMLRSRSLPAFPTSSLLTQSQKLTGSLGCSIDRLQNIADTYVATQSKKQNSLGSSDTLKKGKEDAFISSCESAKTVCEMEAVLSAQVSVSDVPKGVLGFPVVKADHKQLGAEPRSEDDSPGDESCPRRPDYLKGLASFQRSHSTIASLGLAFPSQNGSAAVGRWPSLVDRNTDDWENFAYSLGYEPNYNRTASAHSVTEDCLVPICCGLYELLSGVLLILPDVLLEDVMDKLIQADTLLVLVNHPSPAIQQGVIKLLDAYFARASKEQKDKFLKNRGFSLLANQLYLHRGTQELLECFIEMFFGRHIGLDEEFDLEDVRNMGLFQKWSVIPILGLIETSLYDNILLHNALLLLLQILNSCSKVADMLLDNGLLYVLCNTVAALNGLEKNIPMSEYKLLACDIQQLFIAVTIHACSSSGSQYFRVIEDLIVMLGYLQNSKNKRTQNMAVALQLRVLQAAMEFIRTTANHDSENLTDSLQSPSAPHHAVVQKRKSIAGPRKFPLAQTESLLMKMRSVANDELHVMMQRRMSQENPSQATETELAQRLQRLTVLAVNRIIYQEFNSDIIDILRTPENVTQSKTSVFQTEISEENIHHEQSSVFNPFQKEIFTYLVEGFKVSIGSSKASGSKQQWTKILWSCKETFRMQLGRLLVHILSPAHAAQERKQIFEIVHEPNHQEILRDCLSPSLQHGAKLVLYLSELIHNHQGELTEEELGTAELLMNALKLCGHKCIPPSASTKADLIKMIKEEQKKYETEEGVNKAAWQKTVNNNQQSLFQRLDSKSKDISKIAADITQAVSLSQGNERKKVIQHIRGMYKVDLSASRHWQELIQQLTHDRAVWYDPIYYPTSWQLDPTEGPNRERRRLQRCYLTIPNKYLLRDRQKSEDVVKPPLSYLFEDKTHSSFSSTVKDKAASESIRVNRRCISVAPSRETAGELLLGKCGMYFVEDNASDTVESSSLQGELEPASFSWTYEEIKEVHKRWWQLRDNAVEIFLTNGRTLLLAFDNTKVRDDVYHNILTNNLPNLLEYGNITALTNLWYTGQITNFEYLTHLNKHAGRSFNDLMQYPVFPFILADYVSETLDLNDLLIYRNLSKPIAVQYKEKEDRYVDTYKYLEEEYRKGAREDDPMPPVQPYHYGSHYSNSGTVLHFLVRMPPFTKMFLAYQDQSFDIPDRTFHSTNTTWRLSSFESMTDVKELIPEFFYLPEFLVNREGFDFGVRQNGERVNHVNLPPWARNDPRLFILIHRQALESDYVSQNICQWIDLVFGYKQKGKASVQAINVFHPATYFGMDVSAVEDPVQRRALETMIKTYGQTPRQLFHMAHVSRPGAKLNIEGELPAAVGLLVQFAFRETREQVKEITYPSPLSWIKGLKWGEYVGSPSAPVPVVCFSQPHGERFGSLQALPTRAICGLSRNFCLVMTYSKEQGVRSMNSTDIQWSAILSWGYADNILRLKSKQSEPPVNFIQSSQQYQVTSCAWVPDSCQLFTGSKCGVITAYTNRFTSSTPSEIEMETQIHLYGHTEEITSLFVCKPYSILISVSRDGTCIIWDLNRLCYVQSLAGHKSPVTAVSASETSGDIATVCDSAGGGSDLRLWTVNGDLVGHVHCREIICSVAFSNQPEGVSINVIAGGLENGIVRLWSTWDLKPVREITFPKSNKPIISLTFSCDGHHLYTANSDGTVIAWCRKDQQRLKQPMFYSFLSSYAAG

SEQ ID NO: 778 - DNA, 4317 bp, Homo sapiens
tgaaggctgagttctagagatcgggtcggctttctacgcggctctcgtggaacctagcaaagaaagacagtgaagactgcaggaccttccttcgcgcttttgttacaatccacacacgtcctcttgtccttgtctcccccagaagcagccgccttagtcttgtgagcgtttttacaccgggtagattgagacttggagtgctacactcagcccgagggcgtccagcgcggtggaggcgtggggtttcggctgagcccacagggcacagactgttcatccgcttctcatggcagcggcggtgctgatggaccgggttcagagttgtgtgaccttcgaggatgtgttcgtgtacttctctcgggaggagtgggaactccttgaggaggcacagagattcctgtaccgtgatgtgatgctggagaactttgcacttgtggctacactaggtttttggtgtgaagcagaacatgaggcaccttctgagcagagcgtttctgtagaaggagtgtcacaggtcaggactgctgagtcaggtcttttccagaaagcacacccatgtgagatgtgtgacccactcttgaaagacattttgcacctggctgaacaccagggatcacaccttacacagaaactgtgcacacgtgggctgtgtaggagaagattctcgttcagtgcaaacttttaccagcaccagaagcaacataatggagagaattgcttcagaggggatgatggaggggcctcatttgtgaagagctgtacagtccacatgttagggagatcctttacgtgcagggaggaagggatggacttaccagatagctctggccttttccagcaccagaccacttacaatagggtgagtccatgcagaaggactgaatgcatggagtctttcccacacagctccagtctcaggcaacaccaaggagactatgatggacagatgcttttcagttgcggtgatgaagggaaagccttcctggacacctttactcttcttgacagccagatgactcatgctgaggtgagacccttcagatgcctaccatgtggaaatgtgttcaaggagaaatcagctcttattaatcacagaaaaatccacagtggagaaatatctcatgtgtgtaaggagtgtggaaaagccttcattcacttgcaccacctaaaaatgcaccagaaatttcacactggaaaaagacactatacatgcagtgaatgtgggaaggccttcagccgcaaggacacacttgctcagcatcagagagttcacactggagaaagaccttatgactgcagtgaatgtggaaaagcctacagcagaagctcccaccttgttcagcaccagagaattcacacaggagaaaggccttataagtgcaacgaatgtgggaaagcctttagccgtaaagacacacttgttcagcaccagagatttcatactggagaaaggccttatgagtgcagtgaatgtggaaaattctttagccaaagctcccaccttattgagcactggagaattcataccggggcaaggccctatgaatgcatagaatgtggaaaattctttagccataactctagcctcattaaacatcggagagtccacacaggagcaagctcctacgtgtgcagcaaatgtgggaaggcctttggctgcaaagacacacttgttcagcaccagataattcacactggagcaaggccttatgagtgcagtgaatgtgggaaggccttcagccgtaaagacacacttgtgcaacaccaaaaaatccacactggagaaaggccttatgagtgtggtgaatgtggtaaattcttcagccatagctccaaccttattgtacaccagagaattcacactggagcaaagccttatgagtgcaatgaatgtgggaaatgctttagccacaactccagcctcattttgcaccagagagttcacacaggagcaaggccttatgtgtgcagtgaatgtgggaaggcttacattagtagctcccaccttgttcaacacaagaaagttcacactggagcaagaccttatgagtgcagtgaatgtgggaaattctttagccgcaactctggcctcattctgcaccagagggttcacactggagaaaagccttacgtatgcagcgaatgtgggaaagcctatagcagaagctcccatcttgttcgtcaccagaaagctcacactggagaaagagctcacgagtgcaacagttttggtggccctttagctgcatctcttaaacttgtttaacaccagaaaattcacacaagagaaaggccttatgaatgcagaaaatatgtcatcttgttcatcctcataggactcacaccagagcaatgctctgtgagtaccctttgtgagggaaccatcagctagcagatgagcaccgtatattcattccaccctggggagattcctgataagcaccacatatgtgggaggctttcatgaggtgtgttgcactttgtaactgtctagagctcttgatggaattatatcactgccagtgcctgtggcggaagccatcttattgctaccagctgtgtgtgtcaatcactccattttgctcagggaaggcagacttctgtgctttctttcctgttccctacaggtaatcatgaatattttcaaggacttccccccccccccacttcaccccctaccattgagggtcctcatcttttccctcatgattaggttctgagcaaacatgatctagctctcaccaaaaggacctgagctagggtctgctgggatttcctgacacgattttccatcttcatggacaatgttaactgtaaacgtgatagctgtgacttacttgtcttactgccaaatcgcccaaatttggaactgcttgtcccatgctgctctgatttatacagtgataagggcctattgtggcagtctttactcttggggattttgttactgtgtagagtggattgagaaaagaattgggttctgtcatgaagggagtagcaccttttgtgggcaccacctttatgtgcctcagaggggaccaaaggatggcagaaaactgttctcagtctagtttgacctaatttacactattgccctaggcttgctaggaaagactgaaaaaaatttttgtgcctaactttgtggcctggctgccaggatttcctgtgagcccagtgaggagggcatagttggtgcgaaaatctcctgtgcttgtggaagcaacataagttgggtcccttaactgtcacgtactccccagcactgttgagggattgctgtcttctgtacctgtacaggatcaagtccctgatatccagaaccccataggcaagtaacattgactgtaagacctctgtagggcaatgtgaaaatcatgattgctacagaagcactgagataatggagtggggatgactgtggcaaacaaaaggagattcgaacattctagaggggacatccacaagtctcggtgcagttatgatggtgtgggatgggagtgcatagaaattctcaggaccttcagacatctgtatctcctgtggccaaggccactgtcagaggaaataatctaaatgtttgtggattcctgtgtctccctgggcagttgacctgcacagacaggaacctcagcagtgacagaagagagatccagggatgggtcttctctgacccagccagcattccgagtgactgaggtggatgtggacatcattgcttaccaatttttaccaacattgaggcagggctcactctcctaaattgtagggagaggaatatggtaaagccaaaatagttgacagatctaactttcctagtggaacagtatatatagattttaatgaggaacatttatttaatagctttatggaggtatgattaacatgcaataaactgcaaatatgtaaagtgtaaaatgtgctgtttcagcatgtgtgtacacctatgaaaccaccacagtcaagatatccaacacaacaaaagattgtccctttataatcctcaatttttccttatcttgttttccacaattcacaagcaacagcaagcattttctataattttataaatgaaaccatatggtgtgtactttttagggggtggggctctggctttttcagtaaacataactattttaaggttaatccattatcttgttgcatgaatcaattgtttgctcatttgtattgctgcgtagtatttcagtatttcattgtataccacaatttttcttctttgtcaacttaattgttatggatgtttgggtaactttcagtttttggctattacaaataaacctctgaagatttgtgtgcaaa

SEQ ID NO: 779 - protein, 659 aa, Homo sapiens
MAAAVLMDRVQSCVTFEDVFVYFSREEWELLEEAQRFLYRDVMLENFALVATLGFWCEAEHEAPSEQSVSVEGVSQVRTAESGLFQKAHPCEMCDPLLKDILHLAEHQGSHLTQKLCTRGLCRRRFSFSANFYQHQKQHNGENCFRGDDGGASFVKSCTVHMLGRSFTCREEGMDLPDSSGLFQHQTTYNRVSPCRRTECMESFPHSSSLRQHQGDYDGQMLFSCGDEGKAFLDTFTLLDSQMTHAEVRPFRCLPCGNVFKEKSALINHRKIHSGEISHVCKECGKAFIHLHHLKMHQKFHTGKRHYTCSECGKAFSRKDTLAQHQRVHTGERPYDCSECGKAYSRSSHLVQHQRIHTGERPYKCNECGKAFSRKDTLVQHQRFHTGERPYECSECGKFFSQSSHLIEHWRIHTGARPYECIECGKFFSHNSSLIKHRRVHTGASSYVCSKCGKAFGCKDTLVQHQIIHTGARPYECSECGKAFSRKDTLVQHQKIHTGERPYECGECGKFFSHSSNLIVHQRIHTGAKPYECNECGKCFSHNSSLILHQRVHTGARPYVCSECGKAYISSSHLVQHKKVHTGARPYECSECGKFFSRNSGLILHQRVHTGEKPYVCSECGKAYSRSSHLVRHQKAHTGERAHECNSFGGPLAASLKLV

SEQ ID NO: 780 - DNA, 19 bp, Artificial Sequence
  Synthesized Primer.
cccacgccgacctgattac

SEQ ID NO: 781 - DNA, 22 bp, Artificial Sequence
  Synthesized Primer.
ctagcccaaggcttgcaatagt

SEQ ID NO: 782 - DNA, 22 bp, Artificial Sequence
  Synthesized Primer.
ggaaggtggatgaggctacatt

SEQ ID NO: 783 - DNA, 21 bp, Artificial Sequence
  Synthesized Primer.
tgcttgctgctgctactgtgt

SEQ ID NO: 784 - DNA, 20 bp, Artificial Sequence
  Synthesized Primer.
ccacaaccatgccaagatga

SEQ ID NO: 785 - DNA, 21 bp, Artificial Sequence
  Synthesized Primer.
gatgccagggttatccaggaa

SEQ ID NO: 786 - DNA, 25 bp, Artificial Sequence
  Synthesized Primer.
gagaaccaacctctgtctgagactt

SEQ ID NO: 787 - DNA, 21 bp, Artificial Sequence
  Synthesized Primer.
gagcttgcgtcaggagatttg

SEQ ID NO: 788 - DNA, 22 bp, Artificial Sequence
  Synthesized Primer.
caagaggtggaggtcgcctata

SEQ ID NO: 789 - DNA, 22 bp, Artificial Sequence
  Synthesized Primer.
ggtattccacaaggacgtgctt

SEQ ID NO: 790 - DNA, 20 bp, Artificial Sequence
  Synthesized Primer.
ccacgttcgtcaggttctga

SEQ ID NO: 791 - DNA, 21 bp, Artificial Sequence
  Synthesized Primer.
caggagcaacaggtgggttaa

SEQ ID NO: 792 - DNA, 22 bp, Artificial Sequence
  Synthesized Primer.
ctgttctttcggtagccactga

SEQ ID NO: 793 - DNA, 20 bp, Artificial Sequence
  Synthesized Primer.
ccagcccaacaatcgcttta

SEQ ID NO: 794 - DNA, 21 bp, Artificial Sequence
  Synthesized Primer.
cagccaggctttcagacatct

SEQ ID NO: 795 - DNA, 21 bp, Artificial Sequence
  Synthesized Primer.
ggtccttggcttagcgcatat

SEQ ID NO: 796 - DNA, 22 bp, Artificial Sequence
  Synthesized Primer.
ctagcagcccacagatggagta

SEQ ID NO: 797 - DNA, 22 bp, Artificial Sequence
  Synthesized Primer.
ggtcacggaagcaaacaacttc

SEQ ID NO: 798 - DNA, 21 bp, Artificial Sequence
  Synthesized Primer.
ggctcaaacgtcactggaatc

SEQ ID NO: 799 - DNA, 20 bp, Artificial Sequence
  Synthesized Primer.
caagcaacggctggtgaact

SEQ ID NO: 800 - DNA, 24 bp, Artificial Sequence
  Synthesized Primer.
ccagcacaatatttactgcatcca

SEQ ID NO: 801 - DNA, 23 bp, Artificial Sequence
  Synthesized Primer.
tcatggcaactttgaaggtatca

SEQ ID NO: 802 - DNA, 24 bp, Artificial Sequence
  Synthesized Primer.
catctccttcatgcagagtgacat

SEQ ID NO: 803 - DNA, 21 bp, Artificial Sequence
  Synthesized Primer.
cccagcaggaagaagccatat

SEQ ID NO: 804 - DNA, 23 bp, Artificial Sequence
  Synthesized Primer.
ctaccttacccagccagacaaga

SEQ ID NO: 805 - DNA, 24 bp, Artificial Sequence
  Synthesized Primer.
gaatggcatttcaggagtgtacag

SEQ ID NO: 806 - DNA, 21 bp, Artificial Sequence
  Synthesized Primer.
cggtgtggcatatcgacatgg

SEQ ID NO: 807 - DNA, 21 bp, Artificial Sequence
  Synthesized Primer.
cgacgaggtgaacacgtcttt

SEQ ID NO: 808 - DNA, 21 bp, Artificial Sequence
  Synthesized Primer.
gttgctggcagtgttgtctca

SEQ ID NO: 809 - DNA, 25 bp, Artificial Sequence
  Synthesized Primer.
gctgtgatcttctgtgccttctatc

SEQ ID NO: 810 - DNA, 20 bp, Artificial Sequence
  Synthesized Primer.
gcgctgaggaggaaactgaa

SEQ ID NO: 811 - DNA, 22 bp, Artificial Sequence
  Synthesized Primer.
cactcattcgagccttctttcg

SEQ ID NO: 812 - DNA, 21 bp, Artificial Sequence
  Synthesized Primer.
gtgggcatccttcatgtgagt

SEQ ID NO: 813 - DNA, 21 bp, Artificial Sequence
  Synthesized Primer.
ccttggcagaagctgcagtaa

SEQ ID NO: 814 - DNA, 22 bp, Artificial Sequence
  Synthesized Primer.
cgcacagtgacaaaccatacaa

SEQ ID NO: 815 - DNA, 21 bp, Artificial Sequence
  Synthesized Primer.
ctgcgctccacaaatgttaca

SEQ ID NO: 816 - DNA, 22 bp, Artificial Sequence
  Synthesized Primer.
caaggctcaggagtcctgatct

SEQ ID NO: 817 - DNA, 22 bp, Artificial Sequence
  Synthesized Primer.
gccaggatggtaaatggtcatc

SEQ ID NO: 818 - DNA, 20 bp, Artificial Sequence
  Synthesized Primer.
catggccttccgtgttccta

SEQ ID NO: 819 - DNA, 21 bp, Artificial Sequence
  Synthesized Primer.
cctgcttcaccaccttcttga

SEQ ID NO: 820 - DNA, 21 bp, Artificial Sequence
  Synthesized Primer.
gacgcgctgaacagagagaat

SEQ ID NO: 821 - DNA, 21 bp, Artificial Sequence
  Synthesized Primer.
gcagcaacagcagcattacag

SEQ ID NO: 822 - DNA, 4157 bp, Homo sapiens
agcggggcggggcgccagcgctgccttttctcctgccgggtagtttcgctttcctgcgcagagtctgcggaggggctcggctgcaccggggggatcgcgcctggcagaccccagaccgagcagaggcgacccagcgcgctcgggagaggctgcaccgccgcgcccccgcctagcccttccggatcctgcgcgcagaaaagtttcatttgctgtatgccatcctcgagagctgtctaggttaacgttcgcactctgtgtatataacctcgacagtcttggcacctaacgtgctgtgcgtagctgctcctttggttgaatccccaggcccttgttggggcacaaggtggcaggatgtctcagtggtacgaacttcagcagcttgactcaaaattcctggagcaggttcaccagctttatgatgacagttttcccatggaaatcagacagtacctggcacagtggttagaaaagcaagactgggagcacgctgccaatgatgtttcatttgccaccatccgttttcatgacctcctgtcacagctggatgatcaatatagtcgcttttctttggagaataacttcttgctacagcataacataaggaaaagcaagcgtaatcttcaggataattttcaggaagacccaatccagatgtctatgatcatttacagctgtctgaaggaagaaaggaaaattctggaaaacgcccagagatttaatcaggctcagtcggggaatattcagagcacagtgatgttagacaaacagaaagagcttgacagtaaagtcagaaatgtgaaggacaaggttatgtgtatagagcatgaaatcaagagcctggaagatttacaagatgaatatgacttcaaatgcaaaaccttgcagaacagagaacacgagaccaatggtgtggcaaagagtgatcagaaacaagaacagctgttactcaagaagatgtatttaatgcttgacaataagagaaaggaagtagttcacaaaataatagagttgctgaatgtcactgaacttacccagaatgccctgattaatgatgaactagtggagtggaagcggagacagcagagcgcctgtattggggggccgcccaatgcttgcttggatcagctgcagaactggttcactatagttgcggagagtctgcagcaagttcggcagcagcttaaaaagttggaggaattggaacagaaatacacctacgaacatgaccctatcacaaaaaacaaacaagtgttatgggaccgcaccttcagtcttttccagcagctcattcagagctcgtttgtggtggaaagacagccctgcatgccaacgcaccctcagaggccgctggtcttgaagacaggggtccagttcactgtgaagttgagactgttggtgaaattgcaagagctgaattataatttgaaagtcaaagtcttatttgataaagatgtgaatgagagaaatacagtaaaaggatttaggaagttcaacattttgggcacgcacacaaaagtgatgaacatggaggagtccaccaatggcagtctggcggctgaatttcggcacctgcaattgaaagaacagaaaaatgctggcaccagaacgaatgagggtcctctcatcgttactgaagagcttcactcccttagttttgaaacccaattgtgccagcctggtttggtaattgacctcgagacgacctctctgcccgttgtggtgatctccaacgtcagccagctcccgagcggttgggcctccatcctttggtacaacatgctggtggcggaacccaggaatctgtccttcttcctgactccaccatgtgcacgatgggctcagctttcagaagtgctgagttggcagttttcttctgtcaccaaaagaggtctcaatgtggaccagctgaacatgttgggagagaagcttcttggtcctaacgccagccccgatggtctcattccgtggacgaggttttgtaaggaaaatataaatgataaaaattttcccttctggctttggattgaaagcatcctagaactcattaaaaaacacctgctccctctctggaatgatgggtgcatcatgggcttcatcagcaaggagcgagagcgtgccctgttgaaggaccagcagccggggaccttcctgctgcggttcagtgagagctcccgggaaggggccatcacattcacatgggtggagcggtcccagaacggaggcgaacctgacttccatgcggttgaaccctacacgaagaaagaactttctgctgttactttccctgacatcattcgcaattacaaagtcatggctgctgagaatattcctgagaatcccctgaagtatctgtatccaaatattgacaaagaccatgcctttggaaagtattactccaggccaaaggaagcaccagagccaatggaacttgatggccctaaaggaactggatatatcaagactgagttgatttctgtgtctgaagttcacccttctagacttcagaccacagacaacctgctccccatgtctcctgaggagtttgacgaggtgtctcggatagtgggctctgtagaattcgacagtatgatgaacacagtatagagcatgaatttttttcatcttctctggcgacagttttccttctcatctgtgattccctcctgctactctgttccttcacatcctgtgtttctagggaaatgaaagaaaggccagcaaattcgctgcaacctgttgatagcaagtgaatttttctctaactcagaaacatcagttactctgaagggcatcatgcatcttactgaaggtaaaattgaaaggcattctctgaagagtgggtttcacaagtgaaaaacatccagatacacccaaagtatcaggacgagaatgagggtcctttgggaaaggagaagttaagcaacatctagcaaatgttatgcataaagtcagtgcccaactgttataggttgttggataaatcagtggttatttagggaactgcttgacgtaggaacggtaaatttctgtgggagaattcttacatgttttctttgctttaagtgtaactggcagttttccattggtttacctgtgaaatagttcaaagccaagtttatatacaattatatcagtcctctttcaaaggtagccatcatggatctggtagggggaaaatgtgtattttattacatctttcacattggctatttaaagacaaagacaaattctgtttcttgagaagagaatattagctttactgtttgttatggcttaatgacactagctaatatcaatagaaggatgtacatttccaaattcacaagttgtgtttgatatccaaagctgaatacattctgctttcatcttggtcacatacaattatttttacagttctcccaagggagttaggctattcacaaccactcattcaaaagttgaaattaaccatagatgtagataaactcagaaatttaattcatgtttcttaaatgggctactttgtcctttttgttattagggtggtatttagtctattagccacaaaattgggaaaggagtagaaaaagcagtaactgacaacttgaataatacaccagagataatatgagaatcagatcatttcaaaactcatttcctatgtaactgcattgagaactgcatatgtttcgctgatatatgtgtttttcacatttgcgaatggttccattctctctcctgtactttttccagacacttttttgagtggatgatgtttcgtgaagtatactgtatttttacctttttccttccttatcactgacacaaaaagtagattaagagatgggtttgacaaggttcttcccttttacatactgctgtctatgtggctgtatcttgtttttccactactgctaccacaactatattatcatgcaaatgctgtattcttctttggtggagataaagatttcttgagttttgttttaaaattaaagctaaagtatctgtattgcattaaatataatatgcacacagtgctttccgtggcactgcatacaatctgaggcctcctctctcagtttttatatagatggcgagaacctaagtttcagttgattttacaattgaaatgactaaaaaacaaagaagacaacattaaaacaatattgtttcta

SEQ ID NO: 823 - protein, 750 aa, Homo sapiens; identical to SEQ ID NO: 352
